United States Patent Application Publication US 2026/0324648 A1 - sequence listing, part 6

SEQ ID NO: 17 - DNA, 4277476 bp, synthetic construct (residues 2,138,739-4,277,476 of 4,277,476)
  source 1..4277476: mol_type = other DNA
gcgggcgtggacaatatcggcctcggccagtccctgacggagcgcggcttgaaaatgtgccacatcgagatgaccacggagttcgatataatgcgcgacagcgtaagcgttattttggaccgcgatctgatcggcaaaccagatacccggttgagctgcgaccagcggtaattcgctttcgttcgcggccgaaaaagttagggttaaagcctctgacacggcaacaattccttatttggcaagtatcaagaatccggttattccggcgtctgtccatcggtcatgctgggctatctcattcggcgcagcctgtcagcggttacgcatctacagcgcgaaaaaaccgcctgacaaagcatttttaagggttttaggcgctgctagatgcaacatgacaagagataggtttttattccggttgagcattcatcaggcgctgagggcgcatatccgtccagttcatttccagatagcgtacgcaggcttcccttaccgccggaccaaataccggttcccaaccggcgggaatcgcagtgatttcaggccacaggctgtactggcgctgagcgttgatcagcacaaaaaagggaatgctttcatcatcaaaagggttcacttgggcttcattcatcatattaattactgtcatttttaagattgagtaaataatgcagaccatcgattaatccgccccgccagcacacggcatcatgcccgccagaataaaagcggcagtttacgcggtgaggggattgctctaatgcatgctgcatttcctgattaacctgataaatcacgtcttccctgcgccctgcctccataaagatatccagttgatgatcggctcccacgccttgctgaacttgctgagtaagccaaccggcaacttcagcgttgccgtcgggcatcagcgcggaatcatccatacacggccaccaaaatgaacctgactgactgagtacgcagccaaagcgctgcggccaatgtagcccagcatacagcgcggctaagccgccataactttgccctgcaaccacagtgcgtgaggccaggccactaaaaggctgatactgcgccaccagcggcagaagttcggcctgaatcgccaaccagaactcccgattacaaggcaactcttccccgcgatgctgctgatcgataacgtcaatcagcacataaacggtgggagggagctggccgctctcggtttgtcgatccaacacgccaaataccggctgcccctgcgcccaatattgcccatccagcaaaatagccaacggacgatcctgcggttgatcggtttccccagtggaatagatccaaatattgcgactattaccgagcaacttactgttccagaggatcttatgcagacgcgccggatcgactggcggcggattgccagcatcgacgtctttccaagcaggctgcggaagtgaagcgggaagatgtactgcagagagaggtgtgccacggttgctgtaatgtggtcgaattcgatttagcgggtcgctttctgccagatccagtaaagaaatccaccagttacgctgcgccatgcgccgctgctcatggctaccttccggcagttgcaaacactggctggcgctgaccggaatcacgctatagctaccgcgaaaatcaggctcaacctcagtctgccaataccacacatcggaatcaccgaggcgctttaggcattcaggcgtaaaactgtggtggtcagtgacaccgttaacatcaatataaactcggttgagggaagactgctgagcgtttccctgtgggtctcgccataaaaacgtcagttttacccgatctgtctctctaggttcaaccagaggagtgccccactgcgcaacctgttgccaccatgcctcactgccagcctgaggatcgcttaataagctttggctgtccggataactgttcactgcattcacaaccttccctcgctgtttcaactttctgtatcagtcctgaaaaccattaggcaggctaaagattgattcatatatatttagggatacaagcaaacacaaataatattgagaactatttgtgtttgcaataacatagttggcattcgctctaatacatcaacttatagtttgctcaccccataggcaaactggcggcgcttagcacaaaaataaagcggtaataccgtcgatgtactgattttggctggattggatggccttagagacactgcgttaaggtttggcaggaatgcgcgaacatacccagccgagcctgacaatacgtaataccgggtgaccttaagccctgattgcgcaaacacgctttttatttttattaattgtgttctaggtaagggataaatcatgttcgatctttctggcaaattgatgccaaggaaactaccgcttcgcgtcagctctacctctaagactttactatttacctctgcacttattcttattccgtctctcggcgctcaggccgagacgaataaaactgccaatgcgccgaaagaagataaattagtggtggttgcacaggcgggcagtggggaggaagattcaggttttgtagcgaccaatagctccacggggacgaaaaccgatactccactgattaaaacacctcaggccatctccgttgttacccgtgagcaaatggcggcgcaagatgcgacctcagtcgctcaggcattgcgttataccgctggcgttatctctgaatatcgcggcgcttccaacctgaatgacgaagtgactattcgcggtttcggctccgttcctcgtttcctcgatggtttgagctatagctccatcggcggcgtgcgtcgcgctggccaaatcgatccctggatgctggaacgggttgaagtcgtccgtggcccggcgtcggttttatatggtcaggttaacccaggcggcctgattaatatggtcagcaagcgccctaccgctgaaagtatccataaagtacaggctcgcgtcggaaataataaactggccgaagcggcatttgattttggtggcgcccttgatgacgaggggaaagtcctttatcgcctgaacggtatcggccgcactcaagatgatgcggtgcaatcatttaagcaggaacgttttgccattgctccggcaataactttcttaccaaatgaagataccagcttcaccttattaaccagctatcaaagagagcctgaagccggttcacgtaacttccttccggccagaggattactgaccgcgactcagtatggttatattccgcgtgattttaacgtcagcgatcccgcatttgatcaatcatggcgtgaacaaacttccgtcggttatgctttcgagcattatattaatgacacctttaaattccgtcagaatctgcgttatacccaaataaagcagcattataattatctggtatttttggatatgcagcctgacaaccgcaccatgaatcgccgtgcgcaaatcgaaagacagcaatatggcgaattctcgcttgataaccaattgcaggcagatttctggaccggtgaattaaaccacacggtattaactgggctggattacaaacgtacccgaattgatagccagttcctgatggatcgcggcagcaaatacgatttggactgggtatctccggtttatggtctgaatattcaggaaagcgcgctgggagtcagcgatgacgatctgaataaactggatcaggttggcgtttatctgcaagaccaaatcgaatatggcaactggaatctattgctgtccggtcgctatgactggtcgcaaatgaaagcattaagccgcgtcaccagcaaacagacgcagcaggatgataacgccttcaccggtcgcgcagcggtgctgtacgcctttgattccggtatttcaccttacgtcagctatagcacctccttcgagccgaatacgggtaaaggcgcaccgggtcacgaagcgctgaaacctattaccgctcgtcaggtggaagccggtatcaaatatcaaccgccgggttcgcaaaccttgctgactgcggctctatatgatttacgtcagaaaaacatcagccagcgcgatcaggtgctgaactacgacattcctatcggggaaactcaatctcaaggcttggaaaccgaattaaaaagcgcgctaagcgataatattgatgtcatcgcgtcttatacctacaccacggctaaagtgcgcgaaacaacccgcgttggcgagcaaggtaaaatgccacccactattccacaccacgctgcggcgctgtgggggatgtatacctttaacgaaggcgtgctgagtggtttatctaccggtgctggcgtacgttatatgggcaccagttggggtgatagaaagaacacattcaaagtaccggcgtctaccgtgtacgactggatgatgcgttacgaattaggtaatgcagttccgacgctgaaagggacctcactacaggttaacctgaataacatcaccgataaggagtacgtggcaacctgttcaaccgattccgcctgcttctatgctccgggtcgtactgctaccgcaaccgtcagttattcctggtaatcgctgcgtatacaccgcgcctgtctgctggcaggcgccgatttcctactgccttcctcttatcttccatacaaaccttaaagaaaggtaaatatttccccacgcgttcactctcccttcatcgccacgacaatataactttataaaatataataagttaacctaataataactttccctctcatgtcatttaacctttctaaaattagggttttatctttatactcgccccatcacccattgaggcaaaactatgtcagcgtccgtaggaataccccagttaatgcaccgcatacgcaccagtacccagcgtatgtgcgggctgctgttggtatttttctggctgatacttaatgctcaagttgcggtagctggccatcattgcgatttgatgctgtccgacaaaccggcggttattcagcatcaggaacatactcggcagacgatggatatgtcccacggtcaggcgcaaaatgcgctgtgtgacaaacactgcgtgccggattcgatgcagccagacggcagcgttatcgcgctagccgctttacttccacaaaccgaactgcggctcgcagcggttcaaacccatgaagtgatacaaaaaagcgattggtattcccctcccatcgccggacctccgacggagatcgttttctgtcgtttcagagaataactccagaccttgatatcccctgtatgccgtcattcagcggcaccttgcgtttatttattgtctggagttaatcatgaaaatccttattgctacccttttcctcgtgttacctaccgccgttttctcagccgatccgcattcccatcagcatatgtatcaaccggatgcatcgagtacatccgtagaaaccatttatcagtcccaaggtaaaattaagacctggagcgccgcaggggtattcatcagtcatcaggccattccagctcttaactggccgccgatgaccatgagctttagcttacccacagcagataatctgcaacctttaacggtcggaacagaagccgatttcagcttccgccagaccgcgcagggttacgaactggtttccatcgctccgcaccaatcttaagcagggttaacatgatcagattcctctctcatcgttctccggtgcggccagcccttgcctgctcgctcaccttgctgacgctgtgcctgccgttggcggctcaggccgtcgagatcacgctgaatcaggctatcagttcggctgaacgttattccgccgaactgtccgccaatcaacatcaggtgaatgcgttggaaaatatggccagttccgccactcaactgcccgatcccaaactcaaattcggaatagaaaatctgccggtcggcggcaataacggtcaccgctttactcgggaaggcatgaccatgcagcgtattggcatcatgcaagactatgtaagcggcgataaacgccagcgcaaagccgataccttcaacgcggaggcacgcaaaaccgcggcggccagcgaaactattcgcgctcgtttgcagaaagatgcggcccaatcgtggctggatttggcgctcgccgaacaagccgtcagagatgctcaaaaactggtgctggaaagtgaaaaacagattggcgtaaaacgggctggcgttatcggcggagccagccctgccagtagcgtagtggattcccggttgatgctggttgccatgcaggatcgcctaaccaacgccgagcgagacgtgcgtctggcgcaaacgcgtttgacccagctaaccggtttggaagtgaccaaagccagcggttcactgcccgctttcacccgcctgcctgctgatgttgcggttttgcaggcggcggtgctccagcatcccgaagtattacaggccagccgcgaagcggaagtggcaaaggctcgttcggctcagtctgccattgcggcaattcctgatattggcgtcgaggtttattacgccaaacgttctgagggctatgacgatatggccggggtgatggttagcgtggatttaccgctgtttcgctcccaaagacaggataaagactatgccgccgacgtttcccgcaccatggaagccaacgatcagctcactttactgacgcgagatcatcgggcgcagctcgacacgctattggcacaatatcaggccgcccagcaacgttggcagcgtcagagtcaggaagtgctgccgctgcaaaaaaagcggctagatctgatcattgcgcagtatcagggcaataaaagcgatctgtcctcggtgatggatgcccgtcgggcgctattggaaagcgagctaaacactcgcgatgccgctcgtgaactggccgccctgtgggttgctattcgctatttaatcccgcaggagacaacacgatgaaaaagcacttcactttgagtctggtcgccgtcgctatgctgggcggattgaccggttactggttgggaaaaccggcgcaacatagcgaaataacttcgcctgacaccgcagaatctggccgtaaagtcttatattggtacgatccgatgactcctggacaacgttttaatcagccaggtaaatctccgtttatggatatggagctagtgccccgttacgccgatcaacaggccgatgacggaggcgtgattatcagtgccagacagcagcaaaatctgggcatacgcacggaaaagtcccagatgcgtagcctgaatttgcgcttaaccgcttacggcacggtagctaccgatgagcgcagcgtttcagttataccggctcgtgccaacgggatcgtcgaacagctttgggtgcgagccaaccagcagcaggtcagcaaaaatcagccgttagcgtctctgtggataccggaatggaacgccgctcagcaggaatatctggcgatccgcaagttgggagataacccgctaacctccgccgctcgccagcgtttgcagctgcaatttatgcctgatgaaattattcgtcaggtagaaaaaagcggtcagccgcaaacccgctataccttacgcgctccctccgcaggttacgttaacaagctggatattcgcgctggggcgcaggttagcgccacgcaatctctatttgaactggccagtctggatccggtttgggtcgtcattgattacccacaggctcaggcgagccagttgcagctcggtagcgctattcaggcgacctctgccagttggccaggagaaattttccatgggaaagtcagtgaactgctgcctaacatggatttaactactcgcacactgaaagcccgtatcgtgctggataacccgcagcaaaaattaaaaccgggcatgtacctgaatctgcaagcaacctcgcgggaagcgctgccaccggtgttggcaatcccgcaggaagcgctgttactgactggcagtcgcagtcgggtgctggtcagtgaaggagacggtcactttaaacccgtcaacgtcaccgccggtcactctcaggacgggtgggtagaaattaaacagggactgagtctcggcgagcaagtggttacctccggtcagttcctgatcgactccgaagccagcttgcaaagcgtacttccgcaaatggaggagcctaaatccatcgatggtagcaatccaactagcgccgtcgcgccagatacctatagcgcttcaggccgcgtcaatgctattgacgggcaaactatcactttgagccacggagcgattcctgcgttgaaatgggggccaatgacgatggatttcactcttccagaaagcgattttcctgcgaatatccacgtcggtgctcaggtggattttcaattcacgttggacgataacggcgcgcatattcagcacattaacccatcaaaattggcagataagcagcaaattcatggaggccacctatgattgccgccgtgattcgttggtcattacgcaaccgcttattggtgctattgggtgccgtcatgatggccggctggggaatctggtcgctacagcaaacgccgctggatgccctgccggatctatctgatacccaagtgattattcgcgtcagttatccgggtaaagcgccgcaggtggtggaagatcaggtgacttacccgttgaccaccaccatgctatcggtgccgggcgcagaaaccgtacgtggtttttctatgttcggtgattcctacgtgtatgtgctgtttgccgaaggcaccgatccttactgggcgcgttctcgcgtgctggaatatctcagccaggtgcaatccagtctgcccgccgaagccaaggccgcgctggggccagatgccaccggcgttggctggatctatgaatatgcgttgatagataaaaccggtaaacacagtctggcggatttgcgagcgttacaggattggacactaaaatttgagctgaaaaccgttcccaacgtctccgaagtcgccagcgtaggcggtatggtgcgccaatatcaggtggtgctcgatcctgaacggatgcgcgcactgaatctttcccatcagcaaatcgccagcgccattcaggatagtaatcaagaaggcggcggttcggtattggaaattggctcggcggaatacatggtccgcacctccggctacctgaaaaagctggatgattttaacaacatcgtgattaccgcccgcgacggcattccaatcctgttatcggatgtcgccagcgtgcgaatgggccctgaaatacgccgcggcgtggccgaattaaacggtgaaggcgaagtggctggcggcattattgtgatgcgctacggcaaaaatgcgttggaaaccatcaacggcgtcaaagccaaactgcaacaaattcagcaaacgctgcccgcaggcgtggaaatcgtaccggtttacgatcgctctcagttaatcacccacgccatcgatagtctgtctttcaaactgctggaagagtttctggtggttgccgtgatttgctcgctatttctcttccatttccgttcggcgctggtggctattattaccctgccactgggaattctcggcgcgtttatcgtgatgcattatcaaggagttaacgccaacattatgtcactgggaggtatcgctatcgccattggcgctatggtggatgccgcgatcgtgatgatagagaacatgcacaaagtgctggaacaatggcgaaaagatcatccggggcaaaaacccgtcggaaaggattactggcacatttccgagcgggcggcgattgaagtcggcccggcgctattttgcagcttgctcattatcacgctgtcatttattccggtgttttcattacaggcgcaggaaggccgaatgttctcgccgctggcctttaccaaaacctacgccatggcggtttctgccggtttagccatcactttagtacccgtgctgatgggctattttattcgcggtaacattcccgatgagaatgccaacccaataaatcgctggctaatcgcattatatcagccggtgcttagcgcggtgctggctcgccctaaaactactctgacgctagccgctgtggctttggtcgccacgttgtacccgctcagccgtttaggcaacgaatttatgcctgcgctggatgaaggcgacctgttgtatatgccatcgactttaccgggtatttcagtgcaggaagccacgcggctgctacaacaaactgaccgtctgatcaaaactattcccgaggtcgatacggtatttggcaaggcgggacgggctgaaaccgcgaccgatcctgcgccgttaaccatgatcgaaaccaccattcgttttaagcccaaagatcaatggcgggcaggtatgacgatggacaaattgatcgaagaattggacgccacggtaaaagtaccggggatcgcgaatttgtgggtgccaccgatccgcaatcggctggatatgctttccaccggcattaaaagtcccgttgggatcaaggtaaacggtaagaatattcagcaaatcgaacaggttgccttacagatcgagcaagttgtgcggcaagtgcctggtgtcacttcagcactttctgaacgtttagctggaggccgctacgtagatatcgatatcgatcgccagagagcggcgcgctatggagtttcggtcaaagagctgcaatctctggttgccagcgtgataggcggacagaatatcggtgaaaccattgaagggcgggaacgtttcccgatcaatcttcgttatccgcgtgagctgcgcgattcgctgcaaaaactgcgcgacctgccggtattgaccgctgcgggcgggcaaattgctctgtcggaactggcggatattcgtattagcgaaggcccacctatgctgaaaagtgagaacgcccgcctctccgattggatctatgtggatctacgtggacgagaccttaaatctgcggtgttggatatgcaaaaagcggtggatcagcaggttaaactaccggaaggactctctctcagttggtcaggtcaatttgaatatctggaacgagccaccgccaagctgcaaattgttctccccgtcacgctgatgatcatttttgttttgctgtttgtgaccttcggcaaagtcagggatgccgcactgatcatggcgacactacctttcgctctgatcggcggtatttggctgctgtatggattgggctacaacttctcggttgccgctgcggtgggctttattgctctggctggcgtggccgctgaatttggcgtcattatggtgctgtatctcaatcaggcggtgaaaaagcatcaattaccggggcaaccgctgaccgcggaacaaatgtgcgccgccatccacgaaggggcggtcctgcgagtaaggccaaaagccatgaccgtcgccaccattatggccggattactgccgatcatgtggggaggcggtgccggatccgaggtgatgcagcgcattgccgctccgatgatcggcggcatgatcagcgcgccgttattatcgatgttagtcattccggcggtgtatttactgatgcatcgacgtaaagggtaatctttttcgcgcgggataaaggggtatcccgcgcgcgaaagatcgctgttttaacgggtaaagccgacgcggcaaagatggctgtctccattcagcgtgatagacttaacgccagaagaaatccataacaatctgtattcacttatctctcccagaggattcatcatgagccgtgagattaacaaagacacccgtttgtgcatgtcactggccggacggccgggtaacttcggcacccgattccataatttcctgtatcaagaactggacctcaactacatctacaaagcgtttactaccaccgatattcaggcggcggtcggcggtatcagagccctaggcattcgcggctgcgcaatttccatgccgttcaaagaagcctgtattcccttcctggatgaattagacgcttccgccactgctattgagtctgtgaatactatcgtgaatgacgatggcttcctgcgggcgtacaacaccgactatatcgctatcgccaagctattgaaccaatatcaggtgccaactgaaagcaccttcatgctgcgaggcaacggcggaatggccaaagcggtcgttgccgcgctacgcgatgccggtttcaaacacggtcatatcattgcccgtaatgagaccgccggaaaagcgctagcagaaaactacggctatcaatggcaggccgacgttggcgatttgaccgccgatatggtaatcaacgtgacgcctattggtatggccggaggcgcagaagccgagacgctagcctttgaaccggcaaccattgaacaggctaagattgtgtttgacgtggtggctctgccagcagaaacaccattgattcgctacgctcgagagcagggcaagcaggtgattaccggcgcagaagtgattgcgattcaggccgttgagcagtttgttctctacaccggagtgcgtccaaccgatgaacaggtagaacgtgccgctgctcacgcacgcggttaatatggatttctgaccagaacgtttacctgatttcagacataaaaaagcgcagtatcaaaccgcgctttttatttgcaacctgtcgctttcgcctactgggcgttagccgcttccattccgaccaatcccactttgagataaccggctttccgcagcgaatccatcacgctcatcaatgtttcgtaatccacactcttatccgcctggaagaagattgtggtttccttattggactgcgttcgcttatccagcgccacggccagcgtttcgcggtcaacctgctgctcgcccacgaacagttggttatcggctttcaccgacaggaacaccggtttctcaggacgcggttgcggcgcggcggaggacgcaggcagatccactttgatgtctacggtagccaaaggcgctgccaccataaagataatcaatagcaccagcatgacatcaatgaaaggcgttacgttgatatcgtgtaattcgccgctttcatcaggattttcattcatgtgcattgccataaatcaccccgcacgcagttgttgagcatggcttgatgatttattttctgcggtgctgctagccagatccagatcgcggctcaataacagcaaggcttgcgcggcaacatcacccacgtgagcgcggtaagttccgatcaggcgagcaaagatgttatagataactaccgcaggaatcgccgccaccagacctaatgccgttgccagcaaggcttcggcaatacctggagccaccaccgccaaattggtggtttgcgaatgagcgatgccaataaagctgttcatgatgccccaaacggtgccgaacaaaccgacgaacggagagatagccccgatagtcgccaggaagccggttcctttgcccatctgacggctcacggcagccacacgacgctccaggcggaaagaggcgcgctctttgataccgccattatcagtggattctgccgatagctgacgctcgttttccgcttcgcgcagcaacatgccactgatgctttccggcgcaaaatcttcggcctgcgccaaagcgtcgctcagattagtcgccgagccgagcacaatgtgctcatgacgcaggcgacgacgggcgcggtacaattccatacctttagagaataaaatagtccaggtaacaaccgacgccagcaccagaccaatcatcacggctttcaccactacgtctgcatgctggtacataccccaaacggacaaatccatcgccagaccttgtggagcagcaggcgccgccggagtcacagattgtagcgcaggagcaggagcggcatccggcgttgcgacagaggttaactccggctgcggcagcggagttgaaaccgcggcggtgtgctgcgttgacgcgggcgccacgccagcggcaactgcactgctattacctggggctgctaatgccgggccagataaacctgcgattaacaagagcgccataacgccgcgccctaacttcactccccgaccctggtttgcggcgaatgatttatgttccataactttgccagctgttttcacgctgcgcctccacccaatatgcatatcaatttaaggacgaaatcagtggcggatcatatcaaacaaatgacggattgatagtaattatcattattatttgagccaatttttctatctaaaagataattaaggcaaactcgccgcccagaccgctgtttttcatcgccagcctgcttcaaacgctgataacacttgggctaaacaagtaacaaccatagggttttattcacataaaactcactcgccgtcgattttctttaccaataaaccattactttctgtgcgttttgcagcatttttttgtgcgtaaaccgccttaaacagcggctccccctctttaaacgccatccggctaaaagcgcactacatcaaatgttcatcatgctaatttaaataaataaccaatcagataatggctggcaatcaatccagaccgacactaaccaagcaaggtgagcgcccgtatgtcttcaaaaaaattagaaaccacgttgatcagcgcagggcgcagtaaaaaattcaccctgggatcggttaatcctgtgattcaacgcgcatcgtcgttggtttttgacagtgtaaaagccaaaaagcacgccacaattaaccgtggtaaaggcgaactattttacggtcgccgcggcacattgactcacttcgccttgcaggaagccatgacagaactggaaggtggcgcgggctgtgtgttatacccttgcggcgcagcggcgatcagcaatgccattctggccttcgtatccgcgggcgatcatgtattgatgaccggatcggcctacgaaccagcgcagagtttttgcgataaaatcctgtcgcggatgcaggtcagtaccagctatttcgatccactgatcggcagcgccgtgggtaagttggttcagcctaataccaaagtggtgtttttagagtcgcccggctctatcactatggaaatacaggatattcccgcgatggtgcgcgccattcgcgccgtttcaccaaaagtgattatcatgatggataacacctgggcggcgggcgtgttattcaaacctcttgattttgatatcgatatttccattcagtccggcaccaaatatctgatcggccattctgacgccatgctgggcatcgccgtagccaacgcgcgctgctgggaacaactgcgggaagactcatatctcatggggcaaatggtggatgccgacagtgcctatctggctagccgcggcctgcggacgttaagtgtgcgcctgaaacagcacgaagctaacggtatagacgttgccaactggctggcgcagcgccctgaagtggctcacgtttatcatccggcgctgccagactgtcaaggccatgaattttataaacgagatttttctggctgcaacgggctgttctcttttgaactcaagcaccgcctgaaccagcaacaatttgaaaactatctggacaactttcaccacttcagtatggcattctcttggggcggctttgagtcactgattctggcttaccagccggaagatattaaagcgatacgtaaatatgaagctatcgcgcatcagggcactttagttcgtgttcatattggtttggagaatactcaagatttaattgaggatctggccgccggcttcgctcgtatcgcctcagcgcaataaggcctctaccagtgggaactgcgctaatttgtgcggttttcaccgaagttagtctctaaaccatcaacagaatgaatataccccgctaatttttggttaatgaggataagatcaatgtggcctgagtctaataccgatacactgtaaggattcacggattatcttccccaccaataggcaaacaggaaaagaaatggatgtgttacgcgaaatccttcatgccttatggcaacaggattttagtaaacttgccgaccccaatgtcatttgggttatctacggcatactttttaccactttatttttagaaaacggcctgctgcccgcttccttcctccccggagatagcctactgctgcttgccggtgccttaattgccaaaggcgttatggcttttattccgacgctgattattcttaccatcgcggccagtttgggctgctggcttagctatgttcaaggtcgatggctcggagataccaaggtcgtcaaaagctggctactacaattaccaatacattatcgccagcgggcgcaccaactgtttgtacgccacggtctggcagccctgctcattggccgttttctggctttcgttcgcaccttactgcctacactagcgggtatttctggcctgaatagtacccgtttccaactatttaactggctgagcggattgctctgggtcggtgcagtggtgggtttgggcttcgccctgagccaaatcccgttagtgaaacactacgaaaatcaggttatgaccgcactgatgattctgccggtagccttgctgctgattgggttggtcggctcactgattgtggtgtggtgtaagcgtaaaagcgccaccgaataacgcgttcagacacgctggctatccgcgattcatcgagccagcgtgcccttggttttactagtgactgcgcagttttgcccgctcgtcgctaggcgtatgaccaaagtaacgtttaaattctcggctaaactgcgacgcactctcataccccacccgaatagccgccgtactggccttcaatccatcgtgaatcatcaatattctggctcggtgtaaacgataggttttcaaatattgcagtggagaagtattggttaccgctttgaaattatggtggaaagccgaaatgctcatattcacttctgccgccaactgctccacattaagattttctgcaaattgattctcaatgcgccgtagcgccttagctatctgattaaaatgactgtgacgattcaccaactcctgcaacggagcaccacaagggccggatagcacataaaacagaatctcgcgcacgatttgcggccctaacactctggcatccagcggtttggccataacgtccaacaggcgctcggtggcacacagcatctcttccgtaagcaatgcagcgttgacgccgttggtattacctcggggtttatccagctcatcgtcaccaatatccaccagcagatcctgtagcattgggtgatcaacctgaatggataatccggcaagcggttcttgcgggctggcaaatgtttcacattcaaacggcagcgtcaccgtcagtaacagatagtttttcggatcatactgaaagattttactccccagatagcctacttttttaccttgaaagatgatcacaatactgggggtatacatcaccggcgtacgtggttgatgggcattggaaaacagcagcttaaccttgggaaccgcggacgtcgtcaacccgtttccctgtgccagttgcgcgactttttgcgccagttcccgctgaatatcgtcaatgctcaccataccaacctcatatttcataaaaaatatatcgacacgaattttgctttatttatcacatttcctacagtggtttgtagaaataggcaagaagctggcagaaatgagcattgagctatatgactaagttacccacaatagccctcagagaaatttgcccaataggttttttccgtcgcaaggacgcagcctaagggtgggaagcccactggctaatttactggccattcaaggttgatactgactattagcctattaatcaactacaggttggattataaaatcatgcaaaactttactcttcataccccgactaaagtcctgttcggtaaaggccagattgctgaattggcgaaccaaattcctgccgatgcccgcgtattgattacctacggcggcggtagcgtgaaaagcaccggcgtgatggatcaagtctatcaagcattgaaaaaccatcaattcgaagagtttggtggtatcgagcctaacccaacttatgaaaccttgatgaaagccgttgaactgattcgcgccggtgatttcgacttcctgctggcggtcggcggcggttccgttttggacggcaccaagttcatcgctgcggccgtggcttaccctgaagatccgtggcagattctagaaactgccggtagcaacatcaccgaagctattcctatgggttctgtactgaccctgccagctactggctctgaagccaataatggcgcggtagtcagccgccgtagcaccggtgacaaacgtcatttcttctcaccgcacgttcagccgctttttgccattctggacccagtggtgacctatacgttgcctaagcgtcaggtcgcgaatggcgtggtagatgctttcgtacacaccattgagcaatatctgacttacccggtaaatgccaaggtacaagaccgttttgcagaaggtttactgctaaccctgattgaagaaggcccgaaagcgcttgaaaatccgaaagattacgacgttcgcgctaatatcatgtggagtgccactatggcgctgaacggtctgatcggtgctggcgtaccgcaggattgggcgactcatatgctgggccacgagctgacagctctgcatgggttagaccacgcacagactctggcagtggtgttgccatctctgctggaagcgaaaaaagagcagaaacgcgccaaattgctgcaatacgcagaacgcgtttggaatttgcatgaagggaccgaagaacagcgtattgatggcgcgattgccgcaacccgtcatttcttcgaggcaatgggtgtaccaacccgtttgtctgaatacggtctggatggcagcactattccaagcctgatcaaaaagttggacgaacacggctaccgcagcctgggggaacacggcgatattacgctggcagatagccaacgtatctacgaagccgcaatctgatttaatcattatcgatactataaagggtaaggaaacgtccttgcccttctcctttcaaatttacgatggccatagcctcgattttttcttccagcatcgatacttactgctaggcttaaataccatatccgcggttttcatttagctgtagttcctgcccaagggatagcaacagccccctttctggtactgcaacacctttcgccctattgcatctcgtttatccatgggagagtcatatgtcgaaccaatcagttacaccctcgactgaatctgataatcacatccaggcttgggccgctcctgctgcgggccagccgttagaatccttcgtatttgatgccgggccactggctgatgatgatattgaggtcagcattgattattgcggggtttgccactcagatttatccatgatcaacaatgactggggcatcaccgcctacccctttgtccccggccatgaagtggtgggaaaaatctctcgtattggccaacatgccaaaaacaaaggattaaaaatcggtcaagtggtgggcgttggctggaatcgcggcagttgtatgcattgccatccctgtgtttccggcgatcagcatttgtgccatgaagttcagcccacgattattggccgccacggcggttttgccgatcggattcgcagtcattgggcatgggcaattccgctgccggaaggtgtggatattaccagcgcggggccgctattttgcggtggaatcaccgtcttcaatcctctgctgcaatacgatgttcgccccacacagcgagtgggcgtggtcggtatcggcgggctaggccatatggcgattcgctttatgaaagcctggggctgcgaagtgaccgcttttacctcgtctaataccaaacgtgacgaagcgctttctctcggcgctcatcgcgtggttgccagcaatgacagcaaagcgctggcaaaaattgcgaaccagctcgattttatcttagtgactgcaaatgcctccttggattgggatgcctatgtcagtacgctggcacctaaaggtcggttgcattttgtcggggcgatcccggagccggttccagtgcatatttttgcttttatcgggaaacaggctgagctatcggcatcaccgaccggcgcaccggctcgcttggcagaaatgctggcgttctgtgcacgtcacgaaattaaacctcaggttgagcattttcccctgagcaagataaacgacgccattgagcatttacacgcgggaaaagcacgttatcgcgtcgtgttggatatgcacgcttaatgcataaaatgattagcctgataattaataaataatttcgactacgataaataagagatcgattactgagtgtgcggctggctgcttcggcaaaactgcccgcaaccttgaggagaaattcatgacaaatcaaccgattattaaactgcatgatggcagcataatgccccagcttgggctaggcgtatggaaagctagccacgaggacgttcaggctgcggtcaccaaagcgctggaaattggctatcgttcagttgatacagcggcaatttacaaaaatgaagaaggcgtaggtttagcgttgaaatccgccgcgattcctcgcgaaaagctgttcatcaccaccaaactctggaatgaagatcaggctcatccacaacaggcgttagaaaccagcctggaaaaactccagttggattatgtggatctgtatttaattcactggccagatccaaaacagaatcgctttgtcgcagcttggcgggaactgattaagctcagagaacaggggctaactcgcagtattggcgtttgtaacttccatattccacacctgcaacggctgctggatgaaaccggcgtcgctccggtgattaaccagattgaactgcatcctttgctgcaacagcgtcagcttcacgcctggaatgccactcatcacattgccaccgagtcctggagcccgctggcacagggcggagaaggcgtatttgaacaaccgctgattcatcgactggcggagaaatacagcaaaactccggcgcaaattgtcattcgctggcatctggatagcgggttaatcgtcattcctaaatccgtcacgccgtctcgtatcagagaaaactttgaagtttttgatttcaaactggaaaaagacgaactcagcgagatcgccaaattggacattggcaatcgtctggggccagatcccgatagtttttaaataatggcagccaaataccgcgacaaaattacgcgatttttggtcaatcgacgaacggtaaactggcatcttgaatcggctttttaatcggctttttaatttagctttaaaagcacgcgtgaaccttcgagtcagggatgtcactcatcaatccgccagggatggcggattgatgcatcgcatgtaaaggttctggcgcaggttaacgaactttctgcttaacccggcccgcgtttgtcgactttcccccaggacgagagcctgttgaggatgatttgccctggatattggctggcgcagttttacctgaacctgatgacgttttacctgatgatccttgacccgatggcgggttgcctgatggttctttacccgatgctgatggcactttacccgatgtcattttacctgacgtcgctttgcgagacgtaacttcgcccgatattgctttgcctgagtgggcatgacccggcgtaactttaggtgaaccactcggctgacgctggcgtgcgatagcggtgtgtttagtcagcgctggcgtatggtgacgcaaagatcgtcgagcttcccgctgttcttctatcgtcggcgcaggcaccagacactcccgacgcccaccgatcaaatgtgccatgcccatatcttccaaagcggtacgaatcagcggccagttggcaggatcgtggtaacgcagcagcgccttatgcaagcgacgctggcgatctccttttggcaccaccacgtcttcacttttgtaatcgaccttagacaacgggtttttaccgctgtaatacatggtggtcgagttggccaatggcgacggatagaagttctgtacctgatccagacggaatcggtttttcttcagccatagcgccaaattaaccatatcctcatcccgagtgccggggtgagccgagataaagtaaggaatcaaatactgctctttacccgcctgtttggaataggtatcaaacagttctttaaaacgctggtagctgcccatgcccggtttcagcatttttgacagcggcccttcttccgtatgctctggcgcgatcttcagatatccccccacatgatgagaagccagctctttgatataacgcggatcttctaccgccaaatcgtaacgcactccggaagcaatcaggatcttcttcaccccttttagatcgcgcgcccgacggtacagcgaaatagtgggctgatgattggtatccatatgggtacaaatctcaggatagacacaggaagcgcggcggcaagtttgttccgcacgcggagactggcagcgcagcatatacatattggccgttgggccaccaagatcggagataataccggtaaaccctgggactttatcgcgaatttcttcgatttcgcgaattatagaatcttccgaacgactttgaataattcggccttcgtgctcggtaatcgagcagaaggaacaaccgccgtagcagccacgcataatattgatcgaaaaacggatcatgtcataagccggtatttttgcgtcaccgtaagacggatgaggaacccgttgataaggtagagcaaatacgctgtccatttcctcggtgctcaacggaatcgctggcggattaatccagatatagcgatctccgtgtttttgcatcaacgctcgtgcgcagcctgggttggtttcatggtgcagaatccgcgaggtatgtgcatataacactttgtctgctttaactttttcataagaaggcagcaaaacataggttttttcccacggtttaggcttggcagctcgcaccgtcaccggtttagcttcctcggcatctgctttcccctccggcgcgcaggctaagtcatcaccgtaaggattcggaatcggctcaatacgccccggtttatccaaacggctagaatccacgccgctccagccaggcaaaggcgttttacgaatcactacggtattacgcacatcctgaatatcagcaattttctcgccagccgccagccggtgcgccacttcaaccaatggccgttcgccgttgccgtacaccagcatgtctgctttagcatcaataatcaccgaacgccgcaccgtatctgaccagtaatcataatgagcgattcggcgcaaactggcctcgattccgcctaatatcactggcacatgcttataggcttccttacagcgctggctgtaaaccaaagtggcgcgatccggccgttttccactttcattattcggcgtataggcatcatcgtgacgcaatttacgatcggcagtataacggttgatcatcgaatccatattgcccgcagtgacgccaaagaacagatttggctcacccaaccgcataaagtcttctttattggtccagtccggttgagcaataattcccacgcgaaatccctgcgcttcaagcattctgcccacaatcgccataccaaagctcggatggtcaacgtaggcatcgccggtcaccacgataatgtcgcagctgtcccagcccagcacgtccatctcctcccgcgacatgggtaaaaaaggcgcggtgccatagcactcggcccaataaggcgtgtaggaaaatagatcgcgttctggctgaatcaggctggtactcatggcaatactctttaatcaggagatggagaggaggatgcgggtcaggaaatcatcacagggcggcgattatacgcatttatccatgtaaagaggaaggttatcggtggtttctttgatcccccaccgactcgtggagatcgcccaagaaattatcgaatagacaaacaaatagttgcgggcaatgacgtagaccaggcggcgattaaccgccctgtcttgaagaagaaaggattaaatcggagcaggctgtgtcaccaattgaccggtagagccgcgatcggccatttccagcgtctggctgtagaacaggaatgggaaatgctcggaagagacctgattgaaatacaccagcagctctacatcgccatcgacccaaaccgtatctttccaaccacggtcttccgccattgccggagcgccgttcacatttttcactaggaaagatacgccctgaatatggaaagcctgcggcatatcggcgtgcagcgtccagcgttcccaggttccctgctgcgcctgtgcgtcaacccgattcatatcccaaatcgcgccgttaatgcccggtaagttatcgcccaaacgaaattcacgagagcgtacaacgttgccgtcaagaatttggtcggccaatagtcgcattggcagattatcagttaccagcggcagtaaacccgtcggctttaaggtcaaaaccagcgtggagatcaagatactggagggttcaaacagcccgcgcagacgatccataatacccgcagactcaccggcagtaatggaaacctcgctgccctgcgacatatcaatcaacacttcgcgtcgctcacccggtgccagcgatagctgttgtacagcaacgggcgcgggcaggaaaccctgatcgctagccacaacgtggaaaggtcggccatcgctgatttgcagagtatagcggcgggagttcgaggcgttcagcaaacgcaaacgcacccatccacgagaaacttcgacaaacggactttgcaccccgttaaccagcaaagtatcaccgataaagccgcccttggccggcgggttatattccggaacgccaaagctgtccagtcgtttgtcctgaataataatcgggaaatcatcaacgccgtagtggctaggcagcggcagtgctttactcacctcatcttccaccaaccacattcccgccagcccgttatagacatggggagccatacgattaggcgtattggcgtgataccaacaggtggcagcgctttgacggatcggcagcactggagaccaatctacgcccggtgacatcatgcgcggcgctccgcccattaaagtgccgggaacctgtaaaccgctgatagtcatagaaaccggctcagacagtcggttgctgtaaatcaacttgacatcatcgccgctgtacactctgaccgttggccccagataggagccattgatgccccacacttccgcctttttacggccagacatgaatgcccagtgcgcgcgctgtaacgttaaaaacagcggttggccacggcgggattccagcaatgggggaaccggtaagggaggttgctgcgtaccgctagcctgtgccctcaatggcagtgaacctgcgcatagcgctaagcccgaagcctgaatgaactggcgacgactaagtgacatatcttctccgtgaaaagcactaacaaaccgtatgcaaaagttttgcccgccgacgccgcacgggtatcagcgggcaaaacactaacgatcaaagtcgtttaaaataaaggcatttttattttagcgtatccagtaacatactggagtcgcgttattttttttctgctgcgtacttagcaacttcagcatcaagctgctcaattttggtcgccatcagattacggcaatgctcggcgagttcgcgcactcgctctttgctgtagccgctggtatcaataggtggcagcatttctactatcaccaatccattattccaacggttcaaattaatattaccattggtattggaaacacaaatcggcacgataggtacgccagcggcgatagcagcatggaaagcgccagttttaaacggcaacagaccacgaccgcggctacgggttccttccgggaacatccagatagaaatattacgtttcttaacttgctcaaccacttgcgcaatagttccgtgggctttagcgcgattctcgcggtcaatcagcaggttaccggtcagccaatacagtggcccaaacagtggaatccacagcaggctttttttaccaacggttaccgtaccaggctgaaccacattcgacatagtaaccatatcgtaattattctggtggttagcgatatagatacagttgccatactctgcagcttccgctggaatacgttgttcaacggtgataccgaatagtcgggacattcggccaaacaaatgtccgaaggtcgcaacgtggcggggatttcgtggactgaaaagacagtaaatcgaaccaaacacacacaccaataagcaatacaaaaccgccagtactgagcgcaaaattaataacataacaacctcttgaaaacctaatcgacgctagtatagcggctgcgataaaaaacaccgcgtagattcaccgccataataaattgccattacagaaggttcaaataatctgggggaaaaggccaacggccatggctgatcgatcaaagcggtcaaccgtttaaatcgatgccgatgcggattgccagcctgaatacgactggcaatccgctcagggacaatagctactggttattttcaggctgttcagggcgcgcaggcgcgtccacttcaacccggtctatcttctgcaatccacgaggcaacggcgagcctttgcgtccacgttccgcacggaatttctgtaaatcttctggacgcagcgtcagcttgcgtttgccgaagtacagcgtcaccgaagtctgcggaggcaagacaaacagccaggctagcccgtcttcccctgccgccgcctgcgccgccggaatagagacgatcttattccctttccctttcgacaactccggcaaatcggccaccgggaacatcagcatacgtccagccatggtgatggaaagcaacatatcatccgggccatgaatttccagcggcggcaacgctttcgcgttttccggtagagtaatcatggctttacccgcgcggttcttagccaccagatcgttgaaagtacagacaaaaccgtaaccggcgttagaagccatcaacagtttttgatcgtccggagccatcaacacctgctcaatggtcgcccccggaggcggcgttagcttaccggttagcggctcaccttgcccacgagcagacggtagcgtcagcggatccagcgcatagctgcgtccggtggagtcaataaacaccaccggctgattactcttgccgcgagcagcggagcggaagctatctcccgctttgtaacttaaaccgcttggatcgatatcatggcctttggcgcttcgcacccagcccatctcagacagcacaatagttaccggctcggaaggcacaatatcgtgctcgctcatcgccttggcttcactacgttcggtcagcggcgaacggcgatcatcaccataagcggccgcgtctgcctgaatttcttttttgatcagcgtattcagcttgcgttcagaagccagcagcgcctgcaattgatcgcgctctttcgccagttcatcctgctcaccgcgaatcttcacctcttccagcttggccagatgacgaagtttcagctccagaatagcttcggcctgcgtttcggaaatcccgaaatgctgcattagcaatggcttaggctcatcttcggtacgaataatatgaatcacttcgtcgatattcaggaaggcgactaataaaccctctaaaatatgcagacgcttcaataccttatccagacgatagttcaaacgcttacgcacggtgtcgcggcggaattccagccattcggtcagaatttccagcaagcctttcaccgacggacgatgatctagaccgatcatattcatattgatacggtagctgcgttccagatcggttgtcgcgaagaggtggttcattacctgttcgagatcgacgcgattggttcgtggcacgatcaccaggcgagtcggattttcatgatccgattcatcgcgcaaatcctctaccatcggcagctttttcgctcgcatttggttggcgatttgttccagaaccttggcaccggaaacctgatgaggcaacgctgtaatcaccgcgctgccgtcttcttttttccataccgcgcgcattcgcacagagccacggccattctgataaatcttacggatttcgtctcttggtgtaatgatttccgcttcggttgggaaatcagggccttgtacgaactctagcaattcttccagcgaggtatggggcttatcaatcaacgccactaccgcctgagcaatctcccgcacgttatgcggcggaatatccgtcgccataccaacggcaatgccggtagtaccgttcagcagtatgtttggcaggcgcgcaggcagcattttcggctcctgcatggtgccgtcaaagtttggcacccaatccaccgtcccctgccccaattcacccagtagcacttcggcatatttggataaacgagattcggtataacgcatcgctgcgaacgatttaggatcgtccggtgccccccagttaccctgcccgtccaccagcggataacggtaagagaacggctgcgccatcaacaccatagcttcatagcaggcgctatcgccgtgaggatggtatttacccagcacatcacccacggtacgcgctgatttcttaaatttggcactgttgctcagacccagttcggacatggcatacacaatgcggcgttgtaccggctttaaaccatcgccgataaacggcaacgcccgatccatgatgacgtacatggaatagttcaaataggcgttttcagtaaatgtgtgcagcggtaagcgctctgcaccgtcatgagtcaaatcactcattacttaattatcctcagactcgggcgagaagatcgtggcttacagccaatcatcaccggaagttcattatagatttctgctcgcgatagtaactcatctgcggggtaactgtcacaaatccaaagcaatctacgcgggcaaatctgcctattttcgccgcaggccacgaattttgctgtctggcgcttttgtcgctaaaagcgacagttaggatgaatatccccgctttgttgcttcgcagtcaaaactgttctgcctaaaagcctatttttctatgcgaatgcaatcattagcatacgctgcaatcgagataggccagaaataatagtcacgctgtatacagcatgttgttttcactggttgtcttcacgctacccggagtatgccatgagtaacatactgattattaatgcaaagaaagaatttgcccactcaaaaggggcattgaacgatacgctgaccaaggttgcgaccgagtgtctgcaagaaatcggtcatcaggttaaggtcacggttgttgatcaaggctatgatattgaatctgaaattcagaatttcctctgggccgatacggttatctatcagatgccgggttggtggatggggccgccttggattctgaaaaagtatatcgacgaaatctttaccgaaggtcatggccgtttgtatcaaagcgatggtcgtagccgttcggaaaacagcaagaaatacggatctggcggcctgcttcaaggtaaaacttacatgctttccgtgacctggaatgcaccggcagaagcctttaccgatccaaatcagttcttccacggcgttggcgtggacggcgtttacctgcccgttcataaagcgaatcaattccttggcatggaacctctgccaacctttatgtgcaacgacgtgattaaacagccggacatcgcaggtgatattgcacgttatcgccagcatttatcaacgctgttcgcctaaaatccagcccgatttggagtggttatgattagcgttttcgcagaaattcaggttaaaccgggccgccgtcaggcggtactggattccttcgcccaactgctgccggacgtactggcagagcaaggctgcggcgggtatgtccccatggttgatgtgccaactcagttagcctggcagcgccaagcgcctgatttcatttttatgtgggaacagtgggccagcgtgcaacatctggaacaacatctcgccatgccgcatatgaagcggcatcaggaacgagtgaaagacgatgtattggacgtagttatcaatattattgatcacgccctgccagccaaagcctgatgtatttatatcgatagcttttatgtcagtcgcttgaaagtcaataacacccaatagattacatattgatagattgcatagtggagcaataagacaaacgaacgaatctttaggcacttattccactctgtgactgaagtcagtaaaagcgatcaacatcccagcagaatgaaagcgaaaaagtctaatgtgtctaccggctatccgccctcatcgggtagccggatttcccaatctacgactatttttctgctttgagccaatggctaccctgcaaacgaatctgctcgctcacgtaatccagaaagcaggtgatccgcgcagccaactgcgtattacgataataaaccgcattgatcggttgccaggcttccagcgtttgctccgccagcacctgcaccaagcgtccttccaactgatcttcccgcgtcataaaatcggataactcgacgattccttgtccattcagtgccaaatggcgcaaagtttccccactggatgccgccaagcaaggcgtaatcgatgagcgaccgccgggcaaataaggtaacgcccactgattcagaaattccggttgagtaaatcctaataagctgtgctcagccagtgcttctatcgtttctggcgcaccgtggcgctgaatatattccgggctagccagaatccgcagacggctggaacccaataagcgggcatgaatcgtcgagtcgcgcagagcgccaatacgaatggcaacatccgtccgctgctccagcagatcgatattcagatcgtcggtattcaactccagatcgatctgcggatataactcgcgaaaaccgccaatcatcggcacgatcacatgctgcataaaaggcaccgcggcgttgactcgcagtctcccggctggtttcagccgtcgcagtgcgatttgttcttcggcatcatccaccgcgccaataatctgccgagcgtgagccaaaaacagctctccttcctcggttaactccagccgacgcgtggtacgccgcagcaaggtggtttccagtttttgctccagacggctcagcgcccggctaatacccgatgtggtttgattgcgttgttccgccgccgccgtgatcgaaccgctgtccaccaccgagataaaagcttgaagttcttctaaggtgattttcattattgacatccaggcaaagatttaagctatttaaccgcaaaaacttgtagaaatgaagctgcggttagcggtcataaacgaccacgcccggatctgcatgaatgcagccgggcgcggtttaacgcaaagatccgcaaaaaaagaattacacttcgatctcggcggtatctcccttctcttgtagccaattacggcgatcttcggaacgcttcttcgccagcagcatatccatcaccgccatcgtcttatcgatatcggtatcgtcaacggtcagctgcaccaaacggcgagtattaggatcgagcgtcgtttcacgcagctgtagcgggttcatttcacccaatcctttaaagcgctgaacgttaggtttaccacgtttacgcttcaactgctccaatacgccagttttttcttcttcatcaagcgcatagaacacttctttacccaaatcgatacggtacagcggcggcatggccacatagacatggccaccgcgcaccagcgagctgaagtggcgtacaaacagcgcgcacagcaaagtggcgatatgtagaccatcagagtccgcatccgccagaatgcagatcttgccgtaacgtagttggctcagatcttcgctatcaggatcgataccgatcgcgactgaaatatcatgcacttcctgtgaagccagtacctcatccgaggacacttcccaagtattcaggatcttacctttgagcggcatgatggcctgatattcacgatctcgcgcctgtttcgccgatccgcctgcggaatcaccttctacgagaaacagttcggtcatgctgagatcctgcgaggtacagtctgccagtttgccgggtaaagccgggccgctggtcagctttttacgtaccacttttttcgccgcgcgcatccggcgctgcgcgctggaaatagccagctcggccagttgctcagccgcctgaacgttctggtttagccacaggctgaaggcatctttcaccacgccagatacataggccgcgcactgacgagaggacaggcgctctttggtctgaccggcaaactgcggatcctgcattttgacggaaagcacgtaggcgcagcgttcccagatatcgtcggcggacagcttcacgccgcgcggcaaaatattgcggtattcgcagaactcacgcatggcgtccagcaagccttggcgcaggccattgacgtgagtaccgccttgcatggtaggaatcaggttaacgtagctttctgtcagcagatcgccaccttccggtagccataacagcgcccagtcaatagcttcggtatccccagcggaagaaccgacaaacggcacttccggcaaagtaatcaggccgttgaccgcttccatcagataatcggtcaggccatcggcataacaccagcgttgttcggtgttattcaccatgtctttaaagacgatttccacgcccggacacagtaccgcttttgctttcagcaaatgtgacaaacgggaaacggagaaacgcgggctatcgaaaaacgattcatcaggccagaaatgcacgctggtgccggtgtttcgcttaccgcaagtaccaatcacctgcaaatcctgcactttatccccgttttcaaacgccatgctgtaaatctggccgtcccggcgaaccgtcacttccactcgacgagacaaggcgttaaccactgaaatccccacgccgtgcaaaccgccggagaattggtagctcttattagagaatttccccccggcgtgcagacgacagagaatcagctcaatggccggtacgccttcttccgggtgaatatccactggcatcccgcggccatcatcaatcacttccagagactgatcggcgtgcagaatcacatcaatacggcgagcgtgtccggctagcgcttcatcaacactgttatctatcacctcttggccgaggtggtttgggcgcgtagtgtcggtatacatacctggacgacgacgtactggttctagaccgctgagtacttcaatggcatcagcgttatagctggattgagtcatggtttgattaatgttcggctaagggttggagggctagcggtgacagccgggtgagtgattacactcaccgcatctggcggcgataacgtcacgctgtatcaggcagtcgttagccctaaaaaattcacaatcggtgagaaatagtgttcaaagcctacaaaggcatgatttccacctgattctaccgtttgtcgacaagaggtgtaataagcaaccgcctgtcgataatcgaggatttcgtccccggtttgttgcaatagccagagtaaatcaggcgattccaacggatctatttgcatgactttcaggtcataaacgtgacgagactctaacacatattgctgacccgtgtaggggttctgattttgccccagataatcaatcaacagctcgaaaggacgtaccgccgggttgactaccaccgccggaatgctgaaacactgggaaagccaggtggcaaaatatccacccagcgaggagccgacaatgcccagattctgcccggccttgctcataatgatatcttccagcatttccgccgcctctgccggaaacggcggcaactgcggtaccaacatgtcaatgtgcggatgattttcctgcagccagcttttgaacgcggtggctttcgccgactgcggagagctgttgaaaccatgcagataaagaagagtattcatcaatagccgtccgcatccatattggggttgaactcgtcactgtccaggcggcgtacttccgtttccagcgtaccgcccggcaataaatcgaggtaacgccatcccggcgctacggtatccagagtaaagttagtacagtgcggtttgaattgcacgcaggttgacgggctggccagcagccgcttgccataccaatcaagatccaattcctgatgaatatgtccgcacagcagcgtagtgacgcgcggatagcgaatcaatacatcggccagcatatgagcgttgcgcagactgtgttgatccaaccaggtacaacctgacggcatcggatggtgatgtagcaaaatcaaagtgtagcgttctggatgagcctgtaagcagcgttccatccactctagctgatgttcgcttaattcaccgtaaggcacaccaaaaacctggctgtccaataagagaatctgccagttatcgcctacaaacgcctgttttgatggcgcaatatttgccgcggccagcacatctaccattgccggctggaaatcatgatttcccggcaaccaaaggcatggcgcagacaaacgggcaataccctgcgcaaaatgctgataagccgctatagactgatcctgcgccagatcgccggtcgcaacgatcagatcgtaggagtacttttcggcaataattgcatccaataccgcccgatagctgcgtccggtattgacacccagcaaggtttcatcctcaccggcaaaaaggtgggtatctgttatttgtaatattctgaccctggccccactcgccataggcagttcaaacaggctttccaattggtatccttgttttaagtctgtctaacaaaccggaaccgccacagctccatgcgccaagcaatagcgcaaccagtcagcaagaaactggttaatttgatgcttttcgtcccgttgatgcaactttttattcggataatcataacttgctttgaaccgggagatctgctgactggcacacacttccgctaccctggcatcatggtaaaggcgtaccgacatcgaaggcagcccccaatggccgacgactggcgcagtctgcacaatctcaaccaccgtagtgtagcgagtcgattccaagatagttaatcgataacagatgctattgacctgataagccatgctttcattcacttcgtcagtgcgcggcgttaaacgacgcaattgtgcgtaattagtttcgcacacccgcatcatttcaggaaaatcaggcgtatagcgtttagacattatttttcccactcttttctcagcaactgatggtgcaacgccagccattgtaatgcaatgaccgaagcggcgttatcgataacgccttcttccacccagcggtaggcctgctcgcggctaaccacgtggacgcgaatatcttcattctcttcttccagaccgtgaataccggaggccgtggtggcatccacttcaccgaccataatcgataaacgctcgctggtaccaccggggctggccagataactcaataccggtttacagcgcccaacgatgatacctgcctcttcctgcgcttcgcggcgggcgacctcttccacactctcccccggctcgatcatgccagcgaccatctccagtagccaaggagactcactggaatcaatagctgcgatacgcagttgctccaccagcaccacttcgtcccggatcggatcataaggaagcaaaaccgccgcatggccgcgctcaaaaatctccctttttacctcaccactcatttcaccgttgaataggcgatgacggaagcgatacagattcaatgaaaaaaaaccgctgtaaagtgactcacgtgcaataatttccacatcattcttattcaaagttaccggtgactcttggggcaatgacatatacttttctcctacctgagtattgtgccgatatactaattttttatgacactcgttttactgatataaaaagtaaaagtcttcgcgaataaaaaatgataagcggcgggctagctatgctgtctgagtttaaaatagcaagcgtggcggccttatgggaatggttggaagaatactggtttaagtttgtgttagatttaggtaaataaaggcaagatggcacaatcagccaccttatcccattggcagactctgatagaatcggcaacaattcgtctatcgtcagataccatggcaacattttgcgcacaactgctgcacaacaaggaatgcaaatgaagaaactgctcccccttcttatcggactgagccttgccggtttcagtaccatgagccaggcagagaacctgctgcaagtttataaacaagcgcgggacagcaatcccgacttacgtaaatctgccgctgaccgtgatgctgcattcgaaaaaatcaatcaatctcgcagcccgctgttaccacagctcggtttaggcgcaggttatacctataccaacggtttccgcgataacaatggcgtagacagcaattccacctcaggatcgctgcaactgacccaaaccattttcgatatgtcaaaatggcgcgcgctgaccttacaagaaaaagctgccggtattcaggacgtttcgttccagaccagcgaacaatcgttaatcctgaccaccgctaccgcctatttcaacgtactgagagcgattgactctctgtcttacgttcaggcgcagaaagaatcggtataccgtcagttggatcaaaccactcagcgttttaacgtcggtctggatccaatcaccgacgtacaaaacgcccgcgccagctatgacactgtgctggccgatgaagtgacggcgcgtaataatctggataacgcactggaagttctgcgtcaggtcaccggcgtttactacccggaactggcctctctgaacgttgaacgtttgaaaaccgataaaccagacgcagtcaataacctgttgaaagaagcagaaaaacgcaacctggcgttgctgactgctcgcttaaatcaggatttggctcgtgagcagattaaagcggccgaaactggctatatgccaacgattgatctgaccgcttcttcatcaattactaatacccgttacagcggtagcgccagttcgcagcaaatcaataatgacgctggtcagaacaaaatcggcgtgcagcttagcctgccattatacagcggcggagcaaccaactcggcggttaaacaggcgcagttcaactttgttggcgccagcgagcagttggaaagcgcacaccgtggcgtcgtgcagaacgttcgttcctcgtttaacaacatttcggcatcaatcagcagcatcaatgcctacaaacaggttgtgatttcagcccaaagttcattggatgccattgaagccggttatcaggtgggaactcgtaccattctggatgtgttgactgcaaccaccacgttgtacaatgcaaaacagcagttagccaatgcccgttatgactatctgatcaatcagttaaacattaaatctgctctgggtactctgaatcagaacgatttgatgtcgctgaacgcagtattggataagccggttccaactgcaccagacgctgtggcgcccgagggtaaacagcaacctgcgggcagcgacgcacagaccgcgtctcaaactgtgccggtgactcagccagcggcggcgacaacccgcagttctggtaatccattccgcaactgattctgacgtcggcctttccccaaggccgacattcttcgggcgtagcattgtatacgcccgattattacttttctcatgatttcctccactttagggacaagcatttttcatcgatgaaaaaagagagctagcccgcagcatttcgtatagcaatgtaaagtatgccgctgacctccccctgcgctttaattttatacatctttcccctattcttatggccacgctatatgactataaatgggataaagggcaaaaagcccggacacaggaccaatgacgatgaaacggactaaaaacatcaatcaagagacattccgtaaatcctggcgtaactatcgcttagcgcctgtcgcgttggcggtcagtgccgtatttatgcttgccggttgcgaaaaaaccgatgaaaccgtctctctgtaccagaatgcagacgactgctcacaggcaaatccatctaaaagcgccgaatgcactgcgtcttacaataatgccttgcaggaagcggctaaaaccgcgcctaaatatgcaacgcgtgcagactgtgtggctgaatttggtgagtctcagtgtactcaggcaccggctcaggccggtatggctccgacttcagcacccgcagaagctggcgcaacggcgcagccacagcagagcggcagtatgtggatgcctctgatggccggttacatgatgggccgaatgatgggcggcggcgcaagccaaccactgtttacctctaaatcagcaggcagcccggctaacggcaaatttgttgacgcaaccggtaaaaactacggccctgctaccaccggtcgtaccatgaccgtgcctaaaaccgcgctggcaccaaaacctgcggtaaccaacactatcactcgcggtggcttcggtgaatcagtagccaaacagacctctatgcagcgcagcaatgcttcatcatccaattccagctcgcgcagtatgggtggctaaggtctgattaatgaaacgtttaccgattaccgagcgtccagactggcgcgaaaaggcgaccgagtttggctttaaatttcacaccatgtatggcgagccgtactggtgtgaggatgcctactacgaatttacgctggcgcagattgaagagctggaagataccacggcagaattgcatcaaatgtgcctgcaggtggtagaaaaggtcattaatagcgatgagctgatggcaaaattccgcattcctaaacatgtttgggatttcgtccgcacttcgtggcgcaccaaccagccttctctctattcccgccttgatttagcctacgacggtaaaagtccggccaagttactggaaaataacgcagatacgccaacgtcactgtatgaagcggcattcttccaatggctgtggctggaagatcagatcaacgctggcaatctgagcggcgatgcagatcagttcaacagcctgcaggaaaagctaatcgaacgctttactgaactgcgggaaaaccacggttttagcctgttgcatctggcctgctgtcaggacaccgaagaagatcgcggtacggtgcaatatctacaagattgtgctcttgaggccggattaccaaccgaattcctgtttatggaagaaatcggcctgggtgaaaaagggcaatttaccgatctggataaccaggttatcagtaatttgttcaagctctatccatgggaattcatgttccgcgaaatgttctccaccaagctggaagacgcgggcgttcgctggctggaaccggcgtggaaaagcattatttccaacaaagcactgctgccgctgctgtgggagatgttccctaatcacccaaatctactgccagcatactttgccgaagacgaccatccgccgctggatcactatgtgaccaagcctttgttctcacgggaaggtgccaatatccagatcgtggaaaatggcaaagaagtggcccgcgtggatggcccttacggtgaagaaggcatgatcgtacagcaattccatccgttgccacgctttggcgatagctacacgctgattggcagctggttgatcaacgatcagccctgcggtattggtctgcgcgaagatcgcgaattgatcacgcaggatctgtctcgattctacccacatattatttttggctaatccccaactatgatgtgcaaaagggaaggcaatcgctttcccttcttatatttataaaaccacttatatcaatcaaatcattagcctaaacgaaccgacagcatactcagcgatcccatttcgattccttcggtcggtagagaaatagcttcttttccgtcccaggctcccaaaatatacagcagcggcaggaagtgttccggagtcgggtttgacagcgccgcgccctcatgatccataaaatggaccagtggatggttatccccctgataatcaaggttatccctgacgtactgttcaaaagattcggcccacggataagggctagcctctcccttccagttaaccattctcaggttatgaaccacgttaccactggccacaatcagcacaccctgctcacgtagcaccgccagcttacgccctaattcatagtgataagccgctggctgggtaccatcaacactgagttgcaccaccggaatatcggcgtcagggtacattttaattaacactccccaagctccgtgatccaaaccccattcgcgggtatcggccatcacttcagcaggtttcagcagttgctgaatttgctctgcaagctcaggcgaaccgggagccggatactgagtatcaaacaaagcctgtggaaatccgccaaaatcgtgaatagtccgcggttttcccattgctgttaccgcagttccacgggtataccagtgggcggaaatagccaaaatcgctttcggcctaggaatcgccttacccaacgcacgccatgccaaggtatgactgttttcttccagcacgttcatcgggctaccgtggccgagaaacagtgcaggcatacgagaggtgttcataggaaatccttacagttaaatgaaattatcaggctctagctacaggttggtcgccagaccttgcaactacattacgcgctttcttttcattgcacagccggataaccatgaagaagatagtcaagaaatttgaatgtatagcgagggaagacaaagcgggaatccacagcggaaacagaaatgaaaaaaccgggctattttacctgttaaggaaaataaaacccggttaactcagtcagttaaatcagacagcattcagaatgctgctaaccaaactcagctggctttctgtgcatgagccaagcggtattccgccaggtcatcaatagtcactactggcatatcatgctgtttagcaaaggcaatcacttctggcgcatgcgccatgctgccatcgtcattggtcaattcgcacagtacgcctgcgggtttaaaaccggccagcgttgccaagtcaatggatgcttcggtatgaccacgacgagtcagtacgccacccggttgaccgcgcagtgggaaaacgtggcctggacggctaagatccgcaggtgccgcgttatccgcaatggccgcacgaatggtggtcaagcggtcagcggcagatacgcccgtagtaacgcctttagcggcttcaatagtcacggtgaatgcggtctggaactggctggagttgttggtcaccatcattggcaactcaagctgctgacgacgttcttcggtgatacacagacacacaatcccactgccgtgacgaattgtcagagccatttgttctacggtcatggtttctgcggcgaagacaagatcgccttcgttttcgcggttttcgtcgtctagcaccatcacacctttgccattacgcaaggcgtccaatgcacgctctacacgctcgaaaggcgtgccaaaatctgatagaagggtctgattcatggtaaaaaacctcattaaattatggattaccagaatcagggcggtcttgaggagtgttcgccaaatatacggcaaaaataacgcaagcgggcagtatgcccggcagataccgttactctctcccatccggactataaccgtcggccccggaattacaccggatctgctgacctctacgctgaatgaaattaaccactcaatgtgagcgctcgcgggcttccacaacgcgatacaaaagtacctaactatggtttaccgccggtggggactttcaccccgccctgagaataagcgtaaagactataacgctaatgattcgtccgggcaattggcaaaatgcagaattaaaccctggtcacaaaggtttatagaattgacgccaggcattacactattaggcaatcactaaacatcaaattagggaaataccatgattgacccgaaaaaaattgaacaaatcgcccgccaggtgcatgaatccatgccgaaaggtatccgcgagttcggggatgacgtcgaaaagaaaatccgccaggtgctgcaatcgcaactgactcgtttggatttggttaatcgtgaagatttcgacgtgcaaacgcaggtgttactgcgcacccgcgaaaaactggcaatgttggaacagcggatgagcgagctggaagccaaatttaacgcggcgccagttgctgcgcaggacgaagccgagaaaaccggcgagtaattatttccagcgttcagcttaaaggggctagaatgccccttttttcgttgataaaaaacatcttaatgttagccgatgagtcagcgatcaaccgttgatatggttgtttttggcaaaatgagccaaagtcccgcaaacataaccagagcgtataaactcttccacccaatcatcaacagcaatatgcagcacagcaggctgccaatcatcgccatccagcgtgaacgccctttcaacaagcgaatacccgccaacatacacagcaaataaatcagcacgaaaataccgttggcgtagacgatcagcatatccagcggcagagaaaaccaataagtcagcaacgtagcagccagacagcaacccactacggcgctaagggcattgaccggcgtttggccagcggataagcgagccaaagggctttctgggcgactgacagcctgtgaccacaccatgcgagcaaaactctgggtataaatattcacactggcgaagcacgccagatagccaataatacaagcgacccaaagtgcgcgctgaccaaaaagttgcaccactatgcccggtagagatgcggccgcggcctgctctgtgccataggcatggaaatggagtacggcaacggtacaaccccagtaaaccgcaccggccaccaacatgccgatcagcaaggcgcgaggaaaatcccgtttaggatggcggaattctgtcgccagatgcgcaaaggcttccagaccgacaaaacaccagaacattaccgctaatgcattgaatatattaggaggagaaacatcggtaatcgctggccagggaatctgagcggggctgatatccccccgccaccaaatcgccgcaaccagagcgataatcaacagggcaatcagagtttgaatattggcgctggaacctgcgctacgggtgcccagtagccaaatcaccagtaaagtagccagttgcactatcagcaagccggtagcactccagccaaagatggcctgccagaagccagcggcaatctgcaatgccgctggtaaccccacgggaatcaccgataaaaacagccagcccgccactttacccaaacgtgggccaaacgccatattgacgaaatgagccgcgccaccagcactagggaaatgacgccccagcgcggcgaaggcgatagcaatagggaacaccagggcaatcagcagtggccacgcccataggctgtcgtcgcccgccagcatggcggctaacgccggtacagcaaatacgccggtgcccagcaaggacgtagataacaaaccaacgccctgcgccaaccccaactcctgcttcaatccactcaccgtaccgccttatgccattggccatggcgcagcatccttaccctgattcagcggattgagttaaccgcgcccgtttttgatcgactgaataatattagtagtggaaacaccgtcttcaaagttaagtaccttaacttcaccgcctgcggcccagacttcagcgctaccggcgatatcttcaggcttatagtctccgcccttcaccagtaaatctggtagaacaccagcaattaagcgctgtggcgtgtcttcttcgaaagaaacgacccaatcaacagactccaacgcacccaacacaatcatgcgttgatccaacgggttaaccggacgtttctctcctttcaggcgtttagtggacgcatcactgttaaccgcgacaatcaaacgatcgcccagtttacgggcgttagccagataagagacatgacctgcgtgcaggatgtcaaaaattccgttggtcatgacgattttttcaccgcgctgacgcgcctgagccaccgcagttttaagctgttcttcggtcatcacgccaaaaccagtactggcacggccacggatggcgttttccagttcgatcggagaaaccgttgaagtacccagcttgcccaccacgacacctgcggcggcgttcgccaggaagcaagattcttccagcgttttacccgcggccaatgccgaagccaatacgccaatcacagtgtcacccgcgccggttacatcgaacacttcctgcgcctgagttggtaagtgcagcggcggctgccccagttgcaacaaggtcattccctgctcggagcgcgtcaccagcagcgctgacagctcgaaatcagcaaccagtttcataccgcgactcactaactcatcttcggttttacaatgccctactaccgcctcaaattcagacagattaggcgtcagcagggttgcaccgcgatagcgttcaaaatcactgcctttcggatcgataagcactggtaccttagccgcacgcgccaattttatcatctgctgaacgctaaccagagcgcctttggcgtagtcagaaagcaccaatgcgccaatatgaggcaatgcctgctggatacgatcaaacataggctgaggatcgacaccgtcaaatccttcttcaaaatcaaggcggatcaactgttggttacgggaaagcacccgcagcttggtaatggtaggatgcgttggcagagacacaaaatcacagcgcacgttgacttcattcagcttgctggtcaacgcccgcgccgcatcatcaatgccggttaagccaaccaactgtgacgcggcacccagggaggcgatattcatagcaacgttagctgcaccacccggacgctcttcgatagtgtccactttcaccactggcaccggtgcttccggcgatatccgactggtcggcccataccaataacggtccaacatcacgtcgccaaccaccagtacaccagcgcggcgaaaatcgggcagtgtaactttcatcccatagctccaaaacagatcattatattgtggcggataatatcacaggctttcgtttaccaataaaatcggttttgccttattacctcaggtagatgaatttcagtacaggcaaagggatttgaatagcggttttttccccttttgcgcagtgcatggcaaaaaaccggtgtcagaggcaacatgccgcaatgaaaagggctatccacttcccatccactgccaatttcaatttacaggtcagaaaaaggggcgatattcgccctacagactatttccaatagataattaataaaaatgataagaaaagtgaaatagttatcccagccaatgttgccagctagcggccacctgctctctctcggcaataaagcaatcggcggcaactttgctggatagctcctgtaaagccagatggtgaatctcatcccgcatggtgacgtaggcttgggtcaacgccaccgcttcctgctgttccataatgccgtaattggccatcagctcgaaaatacgcacgttatcagaccaacgggttaaacgcggctcaccggcggcgtagcgcaataccagatactgggcgataaactcgatatcggtaatacctcccgcatcggctttaatatcaaaggtatcccgctgtttactgcctaagtgattgcgcattttctcacgcatttcgcgcacttcctgctgcaatgtcagatcgttacgcggttgacacaaaatacgctggcgaatggccacaaattcctgctgcaggctttcatcgccatacaccatgcgtgcccgcaccagcgcctgatgttcccaggtccaagcttcgctttgctgatattctgcaaaggcttcaatggtgctcaccagcatccctgactcaccggaagggcgtaagcgtgcatccacttcatataaaatacccgatgaagtgcgggtgctaaacagatgcatcacgcgctgcgccagacgcagatagaactggcggccatcgatactgcgctcgccgtccgtcatcacatctaacggacagtccagcaggaaaaccaagtctagatcagagctatatcccagttcccatccgcccagtttgccataaccaatgacggcaaaaccgcgcccttcccgattttgtaaatgagttggctggccgtagcgtttgaccatttgattccaggcttgttgaatcaccgcgtcaataatggcttcggcaagataggttaagtgatcgctcactttcattaccggcagcgcttcagtgatatcgccggcagcaattcgtagctgctgcgcctgtttaaactgacgcaacgcttccagttgttgctcctcgtcatcctccggcacccgcagtaaatactgacgcaattcatcacgataagcgccaggagcaaggggttgatacagcgaatgaggatcgagtaattcatccaataaaagcgggtaacgcgcaagctggctggccaccatcggtgaagcggcgcacagcttaataacgtgagtcagcgctgcatggtattccagcagcagctccagataggtggtacgggtcacaatgctcaacagcagttgaatcaggcggcttagagcgatatccgcatcgcgacgcggacaaacctccgccagcaaacgcggcatcagttgatccagcttatcccgaccgcgcggcccaatggtgcgtttatccacgtcatgacggaaagaagcgagcgtgctaaggaagtgtctgcgcgcatgttcatctaaatgcggagtcaagggcgccaaatcaccttcatccaacgcatcctgccacagactgttatacgaaacatagcaggcatcttcgccaacatcaggggtatcatcgccaattagatcgtcaaataccaaacgaacggactgcatgtgattgtccagcgcatccgtcagctccgcccaattccgtttccccattccccacgccagacgcgcttgattcagcccatcactcggcaaagtttgggtttgttcatcaccaatcgcctgtaaaagattctctaaacggcgtaaaaacaggtagctggtgcagagatagtcaacctgccgctgagtgagtaatcccagctctgataccgcctgtagcgtgggcagcaacgctcgttcctgcaaacgcggctcgcggccaccgcgaatcaattggaatacctgcgtaataaattcgatttcccgaattccacctgcgcccagttttatattgtcttttaggccgcggcgtcgtacttcgcgggcgatcatgcctttcatattacgcagcgattgaatcacgctaaaatctatatagcgacggaatacgaaaggccgcagagttcgacgcagttcctggctataataatcctccgcaccgcccatcagccgcgccttcaccatcgcataacgttcccaatcgcgaccttgttcctgataatagtcttccagcgcggcgaagctcagcaccagcgggccgctatcgccaaagggacgcagccgcatatcgacccgatagacaaaaccatcaatagtttgctgatccaacgcctttatcagccgctgccctaaacgagtaaagaactgcgcgttatccagctcccggcggccaccttgggtatggccattttccggataagagaaaatcagatcgatatcagaggaaaagttcagttctccgccgcctagctttcccatccctaaaatcagcaaaggttgtggaactccctcgctattacaaggcgttccccattctttgcagcaggtttgatacagccaatcgcggctggcaataataatgctttccgccagcccgctcagctgttgcaaggtttcttccgtggtactggtctgcaacgcctgcgaccacgcaatacgcaccatcattcgccgcctgaataagcgcagtgccttcatcagcgcggcttcatcctgcacttcgctcagcacctggcccagccaatccgggtatcgtggccactcatccgcctgcggcggctgctggtgtagctcatccaaccattcgggatgaatcaacaacatatcactgacaaaatcacttagcgtcagcactgcaacgtcttcttctgttaacgtccggcttatcggaagctcatgaaaacgctgtacaatactttgcgcttgcacctgtaattctgaggagagtggcaacatttcgaatccctatacaaaacagcctgcaaaaagcaggctgttaatcagttaacgcgcagctccgttgagccagaaagcgggctgagccaacgcctctttacgggcggtatcacgccagtgtccctgacgttcaacaatagcctgttgcagaccaaaccatccatcaatgtatggatgccattcgctctgcggatagaaaccggataatagctggaaagaaagaatctgacgattcaagcgaggcaactgcgccagatagccatcgtcatccatatgatgtgtaaaggcttctttcaaatctgcagcgctgcgactcagcataatatcagcaaaacgcttaaaggaaccctgtagctttgactgccctttagcatcgaggaacggacgccagccagcgttaaccagccaagatgtgagcgccaacttacatttaagataagcggcgctgtagcacaattgttccgcctcggcatttttcgccgccagtaaaggttccagctcggtcaagagtgcccgcagctcagtgctggctttacgtggcaccaaaccaccaaataccgtcatgatctgacgaatcatcgctaacgcttcgattatcatggcttttgctgattcatcgccacgcagccacagttcttcatggtattgccagtgatccaaggccatttccagacccgcagacattccctgctcaacggtagacttaggcgcaggctgcaccaccaacaacggacgaacttcccgcgccggattgccttttgccaaatggtagccgcgcgcagctttactcaggctcccctgacgcagaccgccgttttgcgccagttctgccgccaacgccagaagatccgcctgattcccctgctttagctccagctccacttcgtgcaaagcttcgctgagatcgttggctgtaacattgcccagatccaaagccagttcaatcaggctttgctggtaagtaactacccacttttcacgcacaaagtcggtctggaatagtggtttcagttcagcctgaagtgcggtgacatcccagccttccggccagatttccacaggaaattgcgccaaatccaactctggtttatcaatagtgacattatattctgggcgctgatgcaaaccgccgaccaccttgccaccggtttttatcgtcatttcaaattgcccatcacagccgcgaatacgtaagcccatatcatgctcgcgcaggcgaccgtcttcggtttcaaagtagatattggtcagcgtttgtggcgcgaaatgttcatgtggccaggacgcaatctggcccggcaaggcagcaatggctgctggagtagcgataaattttaattctatttcaacggtcataatttcattcacaccgatatttgcgagattatgggcattatgcgccattcgcgataatttgcctgttttacaccgctttttctgtacgaaaagtctcgtgcagcaggcgagtcaaaccctattttaacctgatttgccgagtctgccctactagcttgatcagactaattttagtttctgaaaaaccggcgaaaatcgcgctaaacccgcactggcattgagagtaagatagttctcattccggtttatgcgttgcgtcggcaaactgaaccctctactatcgttccataaattcactcataaacgatgatctaatgcagaaattacgcctaatttgtctcgcagtgctaagtctaagcatcagttggggcgcgcacgctgaagaaaaacgctacatctccgatgagctaatcacctacgtccatagcggccccggtaaccaataccgcattctcggcacgctaaatgccggcgatgaagtcaccctgatcagcgttaacgaagcggcagattatggccaaattcgcgacagtaaagggcgtaccacttggatcccaatggatcaattgagtcagtcgccaagtatgcgagtgcgtttacctgatttggaacaacaggttaaaaccctgacggacaaactggctaatattgataatagctggaatcagcgtaccgctgaaatgcagcagaaagttgcggccagcgacggcgtgattaacgcgctgaaacaagaaaatgcagcgctgaaaaaccaattggttgtcgcgcagaagaaagtgaacgccgtcaacctacagttggatgacaagcagcgcaccattattctgcaatggtttatgtacggtggcggcgttgccggtatcggtctgctgctgggtctggtattgccgcaccttatcccaagccgtaagaaaaataaccgctggatgaattaatcgcggaaactgtagattgaatcctatcggctgccatcaggcggccgattttatttgctcgccccacctcgctatactctggtcaggccttaagcctcttatttcagaatcatcgatacaatcggtatcaggagaataacagtgaatatctacctggtcggcggtgccgtacgcgacaatttattaaatctgccggtcaccgagcgggattgggtagtggtcggtgccactcctgagcagttgctttctctaggttatcagcaggtcggcaaggatttcccggtattccttcatccggtcagccgtgaagaatatgctttggcacgtaccgagcgaaaatccggtcagggttacaccggctttacctgctatgccgcaccggacgtcacgctggaagaagatttactccgtcgggatctgaccatcaacgccattgcccgtagcgcggaaggcgaactttttgatccttatcatggccaaaaggatctggaaaaccgcattttgcgccatgtttctgacgcctttggcgaagatccactacgcgtactgcgagtcgcccgctttgccgctcgctttgctcatctgggcttttctatcgcgccagagactcagatattaatgcgccaaatggccgacagcggcgagctttcggcgctcacgccagagcgcgtatggaaagaaacagaaaaagccttaatcagccagagtccacaaacctattttcaggttttacgcgactgcggcgcgctggctgtgctgttcccggaaattgacgcgctgtttggcgtgcctgctccggagaaatggcatccagagattgataccggtatccatactttgatgacgctggccattgccgcacagcttagtccagacattgatattcgcttcgccgcactgtgccacgatttaggcaagggactgacgcccaaagaattctggccgcgtcaccacggccatggccccgcaggtgtcaaacgggtagagaaaatgtgccaacgcctgcgagtacccaatcctattcgggatttggcaaaactagtggcggaatatcacgatttgattcataccgtcgataaattgcgcccggaaaccctactcaagttgtttgacgccattgacgtctggcgcaaaccggaacgtttagagcaaatgattatgaccagcgaagccgatgcccgtgggcgcaccggttttgaaaataatccttatccgcagggcgattatctgcgcgcggcctatcaggttgctaatggcgtgtcgatcaaggaagtggttgccagcggcctgcaaggtctggcgattagggatgaagtcaaacgtcgccgccagcaagcgttggcagactggaaactgactctctgcgaaactaaccagaacagcgaatttcaataaacaggtgtaaaaaagccctgttaaatcagggctttttttggcatttattaacttaaaaagtttacataaatacccaatacactgccgcggccactacaaaacggtaaatagcgaaaggcacaaacgagattcgcttaatcaatgacaggaaggttttgatagcaatcagcgccaccacgaatgccgtagcaaaaccaacggcaaacatcggtaaatcgcccaaagtcaggaagtgcaggctcttatacaaatccaatccgctggcacccaacatcataggtacggccagaataaacgaaaattcagatgctgcataacggctcacgccggtcagcataccgccagaaatggtcgccccagagcgggagaagcccggccacagagctaaacactggaagcagccaatcataaatgcctgacgatacgtaatatcgtccaacccaaccgctttagggtttttaggtttcagccattccgccgccagcagcagcaggccgccgaccaccaaggcgtacatcacactttgaggctgaaacaatgactttatcgcatcgtggaataccagacccaagacgaccgccggaatcatggccaataatatgtgcccgagcgttaaatgaccgccggtctggccatcgttagccactttcttaccgccaaagtggataccgatcaggccgaacaacctgcgccagaacaccacgaccacggccagaatcgagcctaactggatgataacttcgaaagtttcagctttctcaccggtaaagcccaagagatggcccacgatgatcatatgtccggttgatgatactggtagaaactcggttaaaccttcgaccacgcccagaataaatgccacaaacagcgaatacatatccgtcatctacgctacccatacccaataagagaaaaccacaaaaaaacggcaatgttatagaaaaacactgccgtttaaattctattaaattgaaaacatcaaccgccgtaatatgaccagcttatcaatggatggtttcatttttatggcactttgtcgccagaaaaatcagcaggttcgctcaccgcgttcaattattacgccgacgttgcgagcttccgctactgcgccaggtttgctgaccttgattctcacccagggagaagcaaaacgctgcaataatatttcggcaacttcttctgccactcgctcaaccaatgcaaaacgctggccttcgacgtgtttcaagatggcatcgctgatatcagcatagcttaaacaatcgctgacatcgtcactggcggccgctttgcggttattccatcccatttcgatatcgaacactaacttctgtttaatagtctgttcccagtcataaacaccgatggtggtaatcacgctgagttcttcaataaatacgatgtccatcacgtcattctctgtttttgtgcctaccggatatcacttccagccgaatatgcgtattatccactgatgttgcgattaaaacgaccattattaaacggggcggcgttatgagtgctatcgcgcttggtatgattctcttcgcgtatttgtgtggctcaatttccagcgcgattctggtgtgtcgaatcgctaaattacccgatccgcgtgaaaacggttcagggaatcccggagcgaccaacgtattacgcatcggcggccgcacggcagcggcggcagtattagtgtttgatgtgataaaaggtatgctgccggtatggatcgcttatcttctgcatgtttcccctctttaccttggcattaccgctatcgccgcctgtctgggccatatctatccggtattctttaattttcgcggtggcaagggcgtagcgacggcttttggtgctatcgcacctatcggctgggatctcacgggtttaatgacaggaacctggctgctaacagtactgttgagcggttactcctcattaggtgcgattgtcagcgccctgatagccccgttttatgtctggtggtttaaaccacagtttaccttcccggtcgctatgctttcctgcctgattctgatgcgtcaccacgataatattcagcgtttatggcgcggtcaggaaagtaaaatttgggacaagttgaagaagaaaagacagaaaaccgctgccgaagaagcagaagaacaggagttggaagactgatttagcgctcgtccgctcccgtaactcagttctgatgacagagcgagagcgaggcaagcgctgaggattaaaaaagcggagtgagtgggctaaaatccatgaacattttgaatgactgcggcaacgcagccgcagccctgcctagactttcggaagttcagccaacggccaacgtggcctaaccgacaccgtcaactcgctattcacaccagttttcagcctaatcatgcccgcataagcgatcatcgcgccattatctgtgcaaaattcaggacgagcgtagaacacttcgccgccgcgtttttgcatcatttcggctaatttacgacgcaatgtggtgttggcgctcaccccaccggcgataactaaacgtttgaagccggtttgatccagcgcccgtctacatttgattgctaatgtatccacgaccgcatcttcaaaggcgcgagcaatatcggcgcgagtctgatcgtcattaccgttggcgcgaatggtattggcggcaaaggttttcaggccggaaaagctaaaatctagccccggacggtcagtcattggccgagggaacgtgaagcgggaagcatccccttgttgagccatacgtgacagcatcggcccgccgggataatccagacctaacagctttgcggttttatcgaaagcttcaccagccgcatcatcaacggattcaccaagcagttggtattcgccaatgccggtcacgctgattaattgcgtatgaccgccggaaaccagcaaagcgacaaacggaaactctggcgcgttttcttccagcataggcgccaacaggtggccttccatatgatgaaccggcaccgcaggcacattccaggcaaaagccaacgcgcggccaatggtggcaccaaccagcaaagcaccgaccaaacccggcccggcggtataggctacgccgtcgatatcttccggtttcagattggcttcttttaaagcagcctgaatcagcggtacggtttttcgcacgtgatcgcgcgaggccagttcaggaactacgccgccgtaatctgcgtgtaatttgacctgactgtataattggttggctaacagaccggtttcatcgtcataaactgcaattccggtttcatcgcaggatgtttctatacccaagactcgcattacatttcccatcattcacgtgcggcggacagtttaccacaaccgtgaggacagtcatggtttctgctattgactgtttatttagtttttcagaaaacatcatttccctatgcaatggcctgatttctctgcggaaggtcgccagaatgttgttgagtctcactataattgaaaaaattgttgattcgttcgacccgaaccgctgtttagtatataatcagcgcccgccgcacttctgataataaaacagtggtcggtcatacaggggcgtgcctgtttcaatttgctgtggtgctttacaacgcagcatccattgaagtaaaattccgcaccattttgagaaggctggcacttggccagcagaaaccgatttctattgaggtgagaggcacatgccggtaattaaagtacgtgaaaacgagccattcgacgtagctcttcgtcgtttcaaacgttcctgcgaaaaagcaggtgttttagctgaagttcgtcgtcgtgagttctatgaaaaaccgactaccgaacgtaaacgcgctaaagcttctgctgtaaaacgtcacgcgaagaaattggctcgcgaaaacgcacgccgcactcgtctgtattaattcttcgggggcaaccccgcagcgtgatttgttagtttctaagaacgcgcagaccgagtagttgcaacgaaggccgtgctttccgaaaggaatgcgcggcttattctcgtttatggactagcgaataggggcttatggctggacgaattccgcgggtatttatcaatgacttgctggctagaaccgacatcgtcgatcttatcgatgcccgggtaaagctgaagaagcaaggcaaaaattatcacgcgtgttgtccgttccatcatgagaaaacaccctcattcaccgttaatggcgaaaagcagttttatcactgttttggctgtggtgcccacggcaacgcggtagattttttgatgaattacgatcgactggagtttgtcgaaagtatcgaagaattagctaccatgcacgggctggaagtgccttacgaggcaggaaccggcagcacgcagatcgaacgtcatcaacgacaaagtctttatcaattgatggatcagcttagcgctttctatcagcagtcactcaatagcccatcagctaaacaggcacgtggttatctcgaacaccgcggtttgagtgaagatattatccaccatttcgccattggttttgctcccgcaggttgggacaatgccttaaaacgctttggtcgtgatgccgaaagtcgtaccgcactgaacgatgccggtatgctggtgactaatgatacagggcgaacttacgaccgtttccgtgaacgcgttatgttcccaattcgcgataagcgcgggcgagtaatcgcttttggtggtcgtattctgggggacggtgttcccaaatacctcaactcaccggaaacagaaatttttcataagggtcgccagttatacggcttgtatgaagcacaggttattcatcccaatccaacgcgtttactcgtggtggaggggtatatggatgtggtggcgttagcgcaatttggcattgattatgccgttgcctcacttggaacctcaacgacggctgaacatattcagctgctgttccgcgccaccgatcaggttatttgctgttatgacggcgaccgggctggccgagatgccgcctggcgggcattggaaaccgctctgccctatttgaacgatggccgtcagctacgttttatgtttttacctgacggagaagatcccgatacgctggtgcgtaaagaaggtaaagaggcgttcgaacaaaggatggagcaggcgcagccgctatcaaccttcttgttcgaaactctcatgccgcaggtcgatttgagcagccccgatgggcgagccaaattaagtaccttggcgctgcctttaatcagccaggtgccgggagaaacgctgcggctttatctgcgccagcagttaggtaacaaattaggcatcctggatgatagtcagctagataagctgatgcctaaacaggctgaaaacacgaatacctaccaaccgccccagctaaaacgcacaaccatgcgtatacttatagggctactggtacaaaacccgcaactggctacacttattccctcactacagggagttgagcaggcgaaactggctggattaccgctatttattgagctggtaaatacctgtttggctcagccggggctgacgacaggccaattgctggaacagtatcgtgataataaattcagtcaacagcttgaaaccttggcaacttggaaccacatgattgctgaggagatggtcgagccgacctttgtcgatacgctggcgagtctgtatgactcaattttggaacagcgtcaggaaacattgattgcccgcgatcgaacacatggattaaacgccgaagaacgtaaagagctttggtctttgaatcttgcgttagccaagaagaaatgaactacccaacggcttaattgccgataaatgcgggggcgaatccctgcaatatgccgccatagcgggcagcggcgaaaaaaaaagccccaaatgctattgttggcggtttcgccgaccgacaccaacccaaatactctgaagtgtggataccgtcttatggagcaaaacccgcagtcacagctgaagctacttgtcacccgtggtaaggagcaaggctatctgacctatgctgaggtcaatgaccatctgccggaagatatcgtcgattccgatcagatcgaagacatcatccagatgattaatgacatgggtatacaggtgctggaagaagcacctgatgccgatgatttaatgctggccgaaaacaccaatgataccgacgatgatgcggctgaagctgctgcacaggtgttgtccagtgtcgaatccgaaattggtcgtacgaccgatccggtccgcatgtatatgcgtgaaatgggtaccgttgagcttctgacccgtgaaggcgagattgatattgccaagcgtatcgaagacggtatcaatcaggtgcaatgttctgttgcagaatatcctgaagctattacttatctgttagagcaatacgatcgcgttgaagctggcgaagcccgcctgtccgacctgatcaccggctttgttgacccgaatgccgaagaagatattgcgccaaccgcaacccacgtaggttcagaattgtccgccgaagagatggacgatgatgacgacgaagatgaagacgaagacgacgacagcgaagacgataacagcatcgatccggaactggcgcgtcaaaaattcagcgacctgcgcgaacaatacgaaaacgcacggaaagaaatcaagaaaaatggccgtagccatgccagcgctgccgctgaaattctgaaactttctgaagttttcaaacagttccgcctagtgcctaagcagtttgactatctggtcaacaacatgcgcaccatgatggatcgcgttcgtactcaagaacgtatcatcatgaagctgtgcgttgagcagtgcaaaatgccgaagaaaaacttcgtcacgctgtttgccagcaacgaaaccagcgatacctggtttgctgcggctgtcgcgatgggtaaaccatggtctgaaaaactgaaagacgtagcggaagatgtccaacgtagcctgcaaaaactgcgtcagatcgaagaagaaaccggtctgaccatcgagcaagtgaaagatatcaaccgtcgtatgtctatcggcgaagcgaaagctcgtcgtgcgaagaaagaaatggtcgaggcgaacttgcgtctggttatttctatcgctaaaaaatacaccaatcgcggcctgcaattccttgatttaattcaggaaggcaacatcggcttgatgaaagcggtagataagtttgaataccgtcgtggttataagttctcgacttatgccacttggtggattcgtcaggcaattacccgttccatcgcagaccaggcgcgcaccatccgcattccggtgcatatgattgagacaattaacaaactcaaccgtatctcccgtcagatgttgcaggaaatgggtcgtgaacctaccccggaagaattagcagaacgtatgctgatgccggaagacaagatccgcaaagtgctgaagatcgcgaaagagccgatctcaatggaaacgccaattggtgatgatgaagattcacatctgggcgatttcatcgaagatactacgctggagctgccgctggattctgctacctcagagagcctgcgttccgcaactcacgacgtgttggctggcttgaccgctcgtgaagcgaaagttctgcgtatgcgttttggtatcgatatgaacactgatcatactttggaagaagttggtaagcagttcgacgtaacccgtgaacgtattcgtcagatcgaagccaaagcgctgcgtaaactgcgccacccaagccgttcagaagttctgcgtagcttccttgacgattaatcgtcagcgcacttgagtcaaaaaaccccggttaaccggggtttttctttatctattatctattctgcatcaactttcatcggctttttcgttcagccgaagataaacctgacgataggcagctactagctcgtccagcgtcgcacgattcaatccgctgggattaggcaatacccaaacctcagtattaccgatctttagctcctgacgcccccactgcattttacgtacgccaaaagcactgctaaaggcctgcttgcctaaaacagccagaatccgaggttggtatagggttattttatcaatcagttcctgcgcgccctgacgcaattctgccgcagataactccgctgccgctaccgtgggccgttctaccaatgcggtaatgccacagtcggtatccagtagttctaattcatcctcaggagccaactggcgtttagtgaacccggccaaatggataactttccaaaagcgattgctcctattggcaaagtgaaaaccgcgattggcgctgctcagccccggattaataccgcaaaataccactttcaaccgtggccgcagaatatctgtaatcataggcacccctgaatgaatgtataaaccatcactcattctatcaacaaatacaaccatctagatttgcacataaaacacgcacatagctcgctaactgtagacctatggctaaaaactaccgtataatcgccgccacatatggccccttagctcagttggttagagcacgcgactcataatcgcttggtcactggttcaagtccagtaggggccaccaaattttagctgttaaatcagtacattaagccaactttcgagttggcttttttgttggctaaaaaggcaatggcgataaaatggcgatagatattttggtgatcggttaattggggcgaaaaaaaacctgctttcgcaggcttcttttacatccacaacaccccttgattatttctacttggatgtggtggcgctggttttgtttcccccggtgacacaattattctgtcaaccgtttcgtgcgtggcgaaagtacaactgcaatttatattctgacactggtgataacgttccttcgtcttctcactcaggtaacggctagaccgagcatgtgcagcggtcttacaaagcgggcaatgcatcatgctcgtatcccctcatctctctgcttatgcaagtatgataacactagaaacgctcaaaaattagctttaagtgaataaaataatcacaaaaccacttattgtgaactcactccgcctcataagtgacatccgacaacaacacttcgagagacaattgggtggtgtagccgctgttgctcaggctgtgcgataccttgctgattatccagctctgttggtctatcaccgatttaaagccgttgaccgcgactggtgtttcaggaaataaatcagcgcgccccatggctaaagtgatagagaactcagcaactccgcgctgtaacttctcccatttagactgggcagcgcgcatggcggctttttgcgtggcgtaaaccgtcgtgataacaaagacattatcctcagcccccgccagataatccccttgtttttcctctaccggctttttctctttagccgctttggtgcgggtcggcttggctttcgggtgttccagtgcgcggagctgtttaaacttcggcttgcgctttaacttaacctttttcggcttggccggtttggggtctttggtgtgcaaccaactggcacttacaccggtatacgcgccccggtcagcaatactaaaactgtgttggtcgccatcttgtcgggtgatcgtcatttgcggaatgggtttaccactggcagtgacaccgctgcccggcttgataaacaacaatcgcccggctttaacggcggccactgcaccattaagcgaggctaaccgggtgataaacttggcgtcagtttcttgtgtctggtcgatatgagagatagcgatatccgccagcccctcggccagcatcgctttcaggttgttgcgctccgccacctgcgccacgactttacccagcgttgtctcatgataagagacttcccgccgcgcattgagcgaactccgaaaatcggcactgcgggcacgaatagtcagtgtgtctggtgcgccatggtgctcgacctcatccacggtaaagtcacctttaccaatcagcgccgaccctttccagcccaagaacaccgacaacgctgcgccgcgttccggcatggcaagctggccgtcagcgtcgtccagttcaacgtcaagctggtcagcttcaaagccccggttatcggtcaggctcagggacaacagccgagggcgaatattctgtgtgatatctttcgcgttaatcgtcagcataaagtccggggccatatccgccccggccggtagagacatgccggtcatcatgagaataatcctccgatagctgcctgtgctttaccggtcattgctgtcgctttacccagcaactcgtcagcctgttgtttcatgtcgccgaacatggccgttaatgactcgtcaacccgcaacagattgagggtgaactcaatgcgccgggcgctaccgtcttcaaataatagcgtgccggtctggctcagactctcgatgacaaacatgccgtaaatcatgccgctaccctcaaccagcggccacgccttgccttggtcagccatcgactcaagggccagcaatgacaggcgaccaccggtcagttccggcagtaatacaccggacagcttaattttctcactgtctacgccaagaaattgcgcggacgggcgcaagcccacccggctgttagtcggccaacggtactcaatatcgcgccccatgctttggtaaggcgtggtctggcgcataaaaacaaataaccccagtgataacatcatgattaatcattctccatctggccgcgctgacgggcgcgcttatcgcgttcgttcttggcaagcgcatcggtcatcattcgctccgcatcctgtctgctcatgcccggcgggatagtcatcttgatatcattggtggtgacactgctatcaatgatagtggtgccagtattggcggtgaccggctgataaccgccgtacaacacaccgccactgggtgagtacccgcccgagtaagggttatctttcggtaccttatcggccagtccgtctgacttggtatcaatgatgccgagtttttccagcacccagtcaatgccactgcgcagggtgtttagcgcattcatgggcagactgagcgccgccgccagaccctcgccgaataacttgcccgcattggtggccctgtccaaggtttcctgtgtggcttttaccggtttaatcaggtcagcgaaccagttcgaaagctgtttcaccttgtcactaaaccagttgaataccggtttaagcggctcaaaggcggcactgattggccccatagcagcgataaagccctcggccacgccagcaataaaggcgctgataggctcccagtatttacggataagcaggccaccggccacaatggccgcgaccactgccactatcggccatgtcagcgccgtgagcgcggcggcaatggttcctgccatcagtgaaaaaccggtactcaataaaccggctccggccaacagcaggttaaacccggccatcaccggccacgcaatcaatcccagcgcacccagcccggcgaccagtgctaatgccgcgccggtgactttggtaatggtgccgaccagctcagggtttttcctggcccatgcagccacattaatcagccagtcggttgcagttagggtcagtttgcgcagcgcggagtcttgcttctcaaagacttcaatctctaagtcttcccatgccgaactcaggtttttcaaatcgccgtcaaggttatccattctgaccgtggcaattgattgcgcggtgccaccggcctgcatcagcttaccttgtttctccgccagcttgccgttaccggcagcagccaccagtttcaccgcgcctttcatcgcctcttcaccgaatatcactttcaggtattcggcttgctgtgcggtgcctagcttgttctttttaaatgagttgttgatgtctttaaggattttcgccaccggcaacatattgcctttgccgtcgcgggttgtaatacccagttctttcagtgcggccggtgcttgcccgacaggcgcttgcaaccggctaaacaccgcactggtactggtgcccgccatgctgcccttgataccgttatcagccagtacaccgagtaacgcggtggtgtcttcaatgctggccccggcagcctcagcaataggggccacatatttcatggcctcacccagttctaacaggttggtgtttgagctggtaaagcctttcgccatcacgtccgacacgcgtttaatctggtctagcggcaggttaaacgccgattgcatgttggtgacaatatccgctgcctcagcaatatccacaccggacgccagcgacaggttaactgtcggctcagtggcggccagaatggcgttagcgtcatagccagaacgtgccagcgtgtcttgggttcgcgctacgtcagtcggggaaaaggcggtggatccgccgatatctcgcgcctgttgacgaatggcggccagcttggcgtcatttttatccagccctaaaatcgcctgagtgcccgacatctggctgtcaaactccatacccggcgcaaccagtttcgctgcgccgtacagcccggcagttgctacgccaagactcgccgcactggtattacgcacggcactggtggcggctttgcctttctggtaacgattgctgatacggttgagttgttcctgtttcaggctcaggcgttgcagttcttggcgctggcgactcagggcaacagtcgcctcggcggcgctactgcgtaaccggcgctgttcactgctcaggtttttggtcgctatcccgtcggcgttaagcgcatcgcgctggcgctgcactgactggcgcagcccgttgtatttggtttgcagttcagccgccgcgcgcttggctccctccatcagtcgggcttgttgagcggtgggtttctcggtgtttttaaaggcgatagccagggccgccgcatcttctttggcttttttcagcgcctgcccggtgacggccagttgggcgctggccttgcggaaaccgtcaatcttcgccgcctgcgcatcaagggatttgatgctgctttgtgtgttgcgaatatccccagtgagggatttactggcggtttgaatggctttaaacgggcgggtggcttggtctactgctttgagcaatacctgtaactgtaagttcttactcattatttacggctccactgcgtagtaaggctttatgacgccagcgcaccagctcggtgaggctcaaggcccaaagctctgacggcggccagtgaaaaatggcggcaatatccgccatcaggtcgtcaacttccagtttcgggtcgagcgttacgccccctgtttcggcgacaaaaaaccaatcaccttgcccgccagtgccactaaatccggcaattctaagcggctgcattctgcggtggtcagtgtcggtgtggtgatacggggtagcaccacaatcagcgcatccacatcagaatgagcgacatccgaaagccgcaccccgcgcagcgccccggcattggggcggtaaacttcgatttcagtaatcagggtatcgccacgctttagcggggtttccagtaccaccacattctcgttaacctcggcggtggtttcagttttaacagtgagttttttcatggtttttccaattcagtcagtaaggggccagcgggttaacactggccgtcaggggttagcggccaatggccttgcgttgcgcttccagcaggtctacgccgttaaccatttcaatcaggttaaccacgtcaatttccattaccaccttgccgtcaatggtcagcttgtagtaggtgcactgggtcgataccttggtttcggtgtcttccccttgcttggattcgccgccatcaatctctttatgacggccacggatctcaacttctaccgctgtcacttcgccggtatcgtcacgctgataagcgcccgcaaagcgcagcggaaccccgtcaactttaggcgttccccattgctgcaacaccagctcgtcgaggccgcccatcgaccactccatggatagcgcatcgtcatccagacccaaatcaatcggcgcaacgccattcatcccaccgccccggtagttctccagcttgcgagtgagtttcggcagggtgatggcggacacgatccccatgtaatcccggccatcgttaaacaggttcatcaatttcagcttacgtggcagtgccataagtcagttttccttagctgttgacggctgcggcaaagttcaccagatatttatcggtgatacgctggcgcagggttaaatcttccagtggtggcactggggtgtagtcgtaatcgataaacagcttgcccgctttcagggtgtctttatcgttggcgctgtcgtcataccagcaagcgccgtcaataatcagcccggcggatttcatttcgcggaatttggcgttgatgctgccaatcatgtctttgaccagcgtcgggtgcatcgggcggtctatcgcccacaactgcgcctcggccatggtgtcggccagaatctgcgcggtgcgggtgtagttctcaaaggcaaacagtggatcatcagaacaggtacgcgaaccccaaaacttgaagccgtctttacggatcaacgtcgttacacaggctttgttaagtaagtcagcgtcagtgccaacggtctgtaaatcccagtagacgctggcagatataccggtcacgccatttacgccgacgttagacagggttttatgccagccggtatcggtatcaatcttggcgcgcagaccgagggcgcgggcggtggcataagcaatatctgtgctgttggcggtggtgttccagctcaggaagtccggccaaatcaacatcaactcgcgttggctgaaattgtcacggtacaagatagcttcggagagggttttgcaaccgtaggcgctgatataggcaaaggcgcgcaactgctggcagatactccccagtgcggtggatacttcctgattatccagccccggcacaccaagaatacgcgggcgaacaccggtgacagactgcgcatctaacagcgctttcatgccagtgtagcggccgttctcgtctgcgccgccgatgatattagaggtggtttcggcctcatctttaccggtagccactcgcaccacaatggtgactgggcgcgactgttcagcaatcgccagcaatgacgcggccagcgtgccttttttaccggctttaccggcagcggcgcgcacatcagtaatcagtaccggggtattgagggggaatgcggttgcgtcagcatcgtcgctggtgcagaccatgccaacaatggcggtggaaatagtggaaatgacacgcgtcccctcgttgatttcgagaacgcggacgccgtgatggtaatcacccatggggtaactctccgttggttaagggtgagagtatggtgacggcttagtaagcgcgaggcattagatgggggatgtgtgggcgatggcacaacaaaagccccctgaatcggaggctgaaaagaaatgtcaggcagtgactggcggccactctggcaccacatagccattattcaccgcctcggtcagtagccagcgtgatttatccggctcgccaatcaccggtaattctatcaacggccagcctgccagcgtcggccactgtttgaaggctaagcgggtggtaattagctcactgtgctggtcttccgtcagtggtacatcgtcaatagaatagtcgctgaccatcatgggatcggtggcagcaataaaggcatcccgataatgtcgggcacgggcggctaactcatcctcggtagggacataaacgggaatacccccccaaaccggctggccttgctttccggctattctggttttaccggccggcgaagcacaggcaaaaaatgtctgataagtctcgtccgtgatttgaaccgcatcgtccggccaagtttgcgcagcttgatattccgtttttaacgactctggataagcggcattattcgtcgggctgtagaaataattcatttaaatctccttagtagccaatcactcgccacataactctttgcgctgtagggatgttttccccgtatttcttgctcagtgggatcgctgcccatgttgctgctaacatatccgatgcgagagtttttcctattatcgaaatatcggtgatgccacgtagtgtcacgctcatatttaaaactttattagggaacgctattgggaaaaaagcgtcagcataaaaaaactggtcatttgatctggaaaagggtgattctccccattgctcaatgagtccgtccggtcgtttcatccagccggttgcggcggctgaactggcaaagctcgacatatccgggatttgagtagccgctgttcctacctcacgctttgccgcaccttttaaatccaaatttttgagcgtctccgcaacagcgatagggcctagcgctttaatttcagatagtgagttttcaatctgcaagtactggtcatgagggttagcgctgcgaacgtgatcggctaatgccgttaccgctgcattagcggcggccttaaccgctctcggcgtcgccgcgtcggtttcactgttgctgtcggtggcattgctcagtgcgacaaagcctttttcgcttaacgtcgcatcgggatgatgacgggatttctcatgctcagccagtacgttatccgcgtactgcttaacttcaatcaccttatcatcgacatatttacgtgtagccagcaccactgatgggtcgattttcagcgtgacagcagccgcgctactgacaattaaaatcatccgaatggtttgggtgcgcccgctgccctcttgcagttgtggtttataggtttcggcacagttggcaatggcaaccaaatcaccgtctttatccagcaagccaatctcccggatccaccatccgccctcagtctcagggataacctgttcagcaataatctgactggtgttaatcgggtcaatggtcaacatattcagagcagcgcggcgctgctcattcatcagtttggtttgtgccgggctaggggttggcagggttccgccgccatccccgaccgccatttgggtaatttctaagcgggtgccgagcgcggtggcgttcgccagcttggccgcgccgatgttggtcagtaaagcaaagaatctcgctgtcatgggttcactctcaggtcatcgataatgtggattgcggcactggcgtaaccctcgccggtcacggttatagtttcaggtaaatacgggtatacggtcagctcatcaccgctgtaactacctgcggcgacatacagcgggccgctactgtcgagattgatagacaggccgactaagtggcggctgcatggcttggcgtcgtctatcagccgctcaagctcttgatacatttcttcggtaatgccggtttccaatacaccaacatcgaggcgaaaggtgccgggggtctcgttggtcttccaccactcaatcactttgatgagatagcccagcggctcaaccacccggcggattgcgccaatggtgcctttgtgtttgtggacgtactgcgaggacttcaccaccgcgcgcttggtggtttccggccatttatcatcccagcggtcaaccgaccacgcccacgccagataaggcagcagggataacgggcaagtgtcggcgttccagagctgccgaatgggtaccggggtattctctagctcggcgcaggcgcgcgcggcggccacttccagcaccgacgaaccaacaggcaataaacggtcagtcatccgtacccccgacagtgatgctgctgccggtgcaccaagccgcttgggttttatccagcaccacatcagccaggggagcattaattaccacccgctggacaccctcaacatgcagtgcggcatagagcgccgacagacgaatgtcgcgaccaaggcggcgctgtgcggtcacaaaggcggtcagtttcttctctgccgcaatgcgcaccggttcagcctccggccccggatgcagatagagcaccgcgtcaatctcataatcttcaatgtgggcggattgcactgtcacccggtcagccactggccgcgtattctcatcattcaacgcggcctcaaccacggccagcagttcggctgaggcttcgccgttgccctcacgcgataacaccgtgaccgtgacacaggcgggtgtcggactgattgccgaggcatcagcgacccggccgtcagcacttttggcgtgatattcatacgcaccggttggcccggcgacactcaagccctcaaaggcttgcgggatacgcacccggaaatcactgtcagattccatcaccgcctcaatgggtggaatggcggcggggtcagctgggataatcaccagccgctcaacgttgttatttgcgccgagctggtctaaatcgctaccgacggcataggccaccatcaccgcgcgggccgcatcattgacgcgctgacgtaatatcacttcgcggtaggcgttttcctgtagcaacttgaccagcggctcagattctagcgacaacgtgcgggccacggcggcgcgctgttcttccgggtaaagagatatcagcgtggctttgcgctcggccagcagggtttcatagtccagttcttccaccacaaacggcgggggtaacaggctcaggtcaatggttgccatagggttagctcacgggaatggttaaagagagaggtgccgcgctatcggtgcgggtgccggtgatatcaaccaccatttttccgtcaaaggtggtttcaaaggtgataccagtcagcttgaccctcggctcccagcgcaaaatggcactgtaactggcggccataatttgcagtctcaaggccggattttgcggctggtcaatcagctccgatagcagcgaaccataagcgcggcgcatcacccgcgaaccgacaggggtaatcagaatgtaagtatcccgcttaaacggcccattcacttttagagatcttccgacatactgatgatgtcacctgaggagatccttatgcgcaagatccgatttaccgagcaccagatcatcgccgtactgaagtccgtcgaagcgggtaggaccgtcaaagatgtgtgccgcgaggctgctatttccgaagccagctattacaattggaaggcgaaatatggcgggatggaagccgctgatatcaaaaaaatcaaagatctagaagacgagaatcgccgtctgaagcagatgtttgccgacctgagtctggaatgccgtgcgctgaaagacgtcatcgaaaaaaagctttaaaaccagcgataaagcgtgagctcgtcaactatctgaccacgcagtttacgatgagcatacgccaggcatgcaggacgttatcgctgagcaggacggtgtttcgttatcaaccgaatacacgacgtgatgaaccggtgatccagaggctgactgaggcggctgaacgctatccccgctatggatttaagaagctttttcaggtgcttcgcaggcagggatacgcctggaaccacaaacgcatacaccggatttactgtctgctaaaactgaattttcgtcgtaaagggaaacaacgcctgccggtgcgtaatccggcgccgctggccacgccggaagccctcaaccaaagctggtcgattgattttatgcacgacgcgctgacatgtggccgacgttttcggactttcaacgtcgtggatgattttaaccgcgaggctctggctatcgaaattgacctgaatattccggcgcagcgcattgtgcgggtgctggacagaatagcggcaaaccgtggctatccgctgaagatgcggatggataacgggccggaattgatatcactggcgctggcacaatgggctgaagaccatggcgtgatgctggaatttatcaagcccggcaaaccaacacagaacgcgtttatcgaacggtttaaccgaacgtaccggaccgaaatactggatttttatctgttcagaacactgaatgaagcacgggaaataacggagcgctggctgaatgaatacaacagtgagcggcctcatgaatccctgaataatctgacgccggaagaatatcggctgatggctgagaaaccggaaatctcaaaaagtgtgtggaactaaagctgggatacttacaagaatatctgctattgactggctgatatggtcagcgtcggtaatggtctgcccggcggtgcggttcatgccgagataggtggcagtggtcatttaattccctccgtataatccccaccacgcaagacgccgccgtggtcatggtcatcaaccaccacaccattggatgagaacttgccgccggaatgttcaatattgccgctcatctggccgcctttcttcacgttcaacgtgccggtggtcaggttgttggtacattccacttcgggtgtatccagcaggattttgaccaaggcagcacaggtgatagtgggggcagtggcatttatcgattcactggcattgataaccgccgttttgatgccatcagcctgcaactcgccgctctcaggttcatagtgcaacgtggcaccgtcaggaaaggcgatatacaggccatccgccgaggccgacggcggcgggaagtcatcagagaaaatgcccggcagcacaaaggcggtatccagctcgccgccgagggacaatatcaacacctgctccccctcagacggtgcccaccatgatcgcgattgaccggcgcgcagtgtcagccagttaagccagccggtggtattgtcccccgtcgccacacggcacagggcttggtcgagatcgacctcggccaccgtaccaatacggatcaggttgcgcagcaggcgcagaatttcagtaagttgggtttgtgtgttcatagatgaagcatgtcttttttataaacacgcttcaattagatgttgttctgctgtctatggcacaaaaatatatatctattaaataaatttaattattttttatcgttaattcaacttcatgatatttttccgaaaataatgaactagaaccagagttaagtgtttcacaagtaagaacacctgccttaagaagcaataatggcattgtccctatgtaataataaaaatcagcagcctttttattattataaagcaacactgtcatatctttattatcttcatcaaactctaaatgcctattaaggacggcttctaaactgctatgtgcttcagtgcatagttttgaatatattgagtcgtactcatctttcaatcctgccattgtgaacttttcagctatggttgttttgccatcaactctttgaactattttctttagacttcttatttcgttcttattttttttataaattaaacaaaagctatccatttccaataatgacttagtgtatttattgccttttttggaactccgcatcaatctctcttctctttcgtgaaattccaatataagcaatttaaagtattcttcattgttatgaatatttataacatcaacataacactctagaaaagttctaaaaatagagtatgggccggtgaaattattagtttccaaaagtgtgatcatcgaccttgttaactcaatcatagatgagaatatgcctatggctaatactgacttgatagacttcttattaaacgatatttctctaatgttattttgagaaaatgtaagagactcttttagagtgtccattggattacctttttcacccatattttaaattatattagcagaaataacatattgttagactattatttaccgatgtaacttagtacagccatttccacaatgtctatatcttgctgactgaaaccgagcaacggccgctcgtcatactgcacatctttgctgtgcacgttcggacggtcacgcaggccaaaatggtgcactgccgccatccgttccacgcgcccggcaaactcaaccaccgcctcatcagggctactgttggctttcatatagcgggcggtgcgcaacttggcgaacatttcccgtttaatgcggccttttggcttacgcaatggttgagatttacgcgccgcatacagggagccatcaggcgcttgctggcgtttaatgcgttgctgctggctggcccgcaggcgtttggcaactgtcaccgccagcgctttgcgggctttgggtgtcagactggcaatcagcccggccagtgcatcatcaaagggtttcagcgtattcatttaatccgctcaccgtggaaataaatttcagttggacgaggaagtacgcccgacaatgctggctcaggggcatggttaacatgcaatgcgccgtccagttctttcacaatcacccgctcagtcagttgcaagtcgatacggatatcacttaacacatcgctcatcacatcaaccttatgaataaagccggtgcggcgtttttcttctgttgccatgatgtccggttgatgttcccgcaaccatgccagtatcggcacaaagagataatcaacatcatcggggaaatcctcaataaacagcgtcagcgtatattgattttcaaaagacagcgacggggccagtgttgagacaatgcgcccgccatcaacaaacattttcagccgctccgggttagtctggaacagttgcagactgtcggttaaggcttggcgtaacagtttgggttttaacatggtgttgttcctgacactgtttaacagcttccacttgcagcccgcaggccaccagtgcggtttctaattggcgaatgtcggcacttaaatcaccgttaaccgccggtgtgctgcccggcagcgggcaactgctcaccgtcggacagccaacgtaaataatcgttggggttggcgaacgcggggcgctggtgcagccggataacgccagcaggcaaagcagtagcgaaccaatcacgcaagactttattttcattgagtaacctttgaattctctgttcacgagataatgacaaggtgctggcgtggctcagtgattgccgtaatgcccgctcattgtctgcctgttgccgggcctcatcttgcaggcgggtgatcgcgttgtcccggctctcaattccggtggataaagtgccaatcaccagtttggcgctgtctaactcttttttaaggttatgggcgtgccacgccagcacccccatcatcaaaacccataacagaagtaatgtgcgcatatcataccccgctcaggcagtgtgtttgctcggtggtacgtcgacgctctaaccctttggttttcacgccgttgacgtagacccagcgcggcaactgattgcaggcgctgcgccagtcgcccttgttgacaaaaaaggccagcgtcgagcgacaggccgcccccgtacccacgttaaaggcgaacgacaccacggcgtcatacaccggttgcggcatggcaaccggcatacacactgccacagcccgttcgacccgctgcacgtcagcaaccagattgaccgccacctgtcgctcactgataacgctgcccggcttaaccccggccgtgtgaccgatgccatttgtccagacgttggcgctgcactgataggcgttgagctggcagccctcataatcggcgatcagttttagcccggcgggcgatgtgttgagcgtctggtaatttggcaaggtggcggccagcgccagaatcgccccgaccagacagcgcttaacgattgagttcatcgaacacctcccgcctgatagccaactcttttagcaagaaatagctcttacgccggtagtaccagttgataaaacaggtcgccgcagcggccaccgccgccacataaaacgcgatatcttgcggactcagtgcgccaataaacgccagtaccagcgccaatacataggctaccgcagagctaaatttctccattttcaatcccataattgaacggtttcacgttgggccgccggggccatgtcgggcaacgccaccggataaccatgcggcagaatggcccccagttccgacagccccggattcgcgtcatagacttgctccagcacatcttgtgtgcgcccgtaatagcgccagcacaatgcgtcgagcgtgtcgccttgcaacgcgttgacctgcatcagataaggccaataatgttgtgaggcttaccggcaatgttgcgaatactaatccgcgcatcacgccacaactcatcaaccgtactttcaatggcttccgcacgtttatcaccgcgcgcgctggcgtcatagccgcgataacgctcggccaacagtgcagccgtaatggcacagaccgcccgctggtactcggccaactggatgctttcgccgtccagttgctcggcctgcacctcggccagtgttttaaagcctgccgtcatctggtcacggcggtactcaaacagttcagcgttaacctcggcaatagcgcctttgatggtgaagcgcagtcgctcggcggtgacggttccctcaaggcgcaacagctcgcgcagttttatcgggtcaaccgcaggccagaaaaaggtattttcaatcaccggttcggccgttttgtcaggccgtggcgcggggataacaacagtggtcatggcaacctcaatatcagaatgggtgggcggtggacgacggcgttaacaaggtaaaccctgttgcggccatcgtgccgcccggctcggggagcgttcggtttagcggctggcggcgttctttaacttcacggccagtcgctcaatgtctttcttgacgccacaaccggtatgcagttggagtgcgcggtgaaggtggctcagggccagttcgccccggtcactgtcacgcagtacataaccggtcattttgtgcagttttgcccgcacctggtcgggcatgtcttcgtcttccatcagctcaatggtttgcagcagatggtcaacatcaaccggcttaccggtggcataggctcgcccggcagactcggccacttcctcggcaatcaggtaagcggtagaacgagtaaaacggtctgttggcactaactgataacgcagagcataacgggcgatatccagtgcgccggggatatccccggcatccagacgccaaatcatgatggtcattaaaatggcgtcctgcgcgcctttcccctcactcaatacacccgacacccacggcagatagtccggcaataactgccgcttcagctcggctttacgctcgtttgaacgcacctgtttcagcttgcgtttatcttcattgagcttgagcaacatcagctcgtagccggtggcatgacgtaacgggttatcccgtagctgtgaggcggcaatagccgactgttggataaagtggcggcgcgcaggactggtcatggcttatttaccctcgtcggtaacggtaggtgcggaggctgttttcaccgcttcaaccagtgcatcagcaagacgatcaaagttggatttgtccgctgcttcggtgtcttcttttttcggcggcgataaaatctcgatattttccaccagacagccgcaggcgtaatcctccaccacataatcctgtttaatggattcatagttttcgatgcggtcacgcttggcgttctcatcgatatggcggcggtgcgagtcttccagccagtaaatagacaggttatcgaggcgggtgatcatgaatgcgttagccgggaagaatggcacacggatagccggtaaattgccgatccgcttctggctgataatcaggtcagcggcgagggtttcgctgttttcctgctctttattgacgatggggaaatacttatcctgcatcaactgacggccagtgataaccaccagttcagggtcttcctgatgccattccgcaatcatgttattcgtggcgtccatcaccagcgcgtccagattgacgtaatcaccgccatggccgacacgaattttttccgacactaccgcgccatcgtcaccgatgattttactcattacgcgggttggggcattggtgcggtatttttgcaaccagcccggcgcaatatcctgcaacatcgggttgagtgcacggtttgaggtcttggcacggtgggtgccattgaagcccgccatgatacggtcaagtgcctgacgcttgataatcgcgtcgcgcaagcgggtctggaagtcctgataacgcgcccacaggtcgagggtgttatagcgaatgtggaaatcgtagttcacctgctcacagaaatacttctcactgtccagccctgcaaactcagcggtttcgcgctcatcgccaccgtcagtatcagtattgctggcaattgacccggtaacactcaggcccactttttcagcggtcagctcggcgacgggcacaatattgatgcggctcagaaactctgaggactcttgaacgcgggtcatgatggtttgcgtgacggagggttcaacgttgaattttttattcaaatcgccggttgcgaccccgttcagttcggcttgacgggtcagataggcattaaatttaaaacgggttgctgggcgcataataatcctgattcagttaaataatgtaatggtgaaataacaacgtgaccgcacaatgggcggcctgtggccctgattagcagtcagtcagcacgtcggcttgaccactgacaccagtggattccgggcgcttggtctggttaaagttttcagtgatagacagtttgttttcgagggacgtaaccccttgttttcccttttcgatgctctttttcagctccaccacgttgtcagtcagttgtttctcaatggcggcaaagcgggcttcaatggtttccccctgttcctgcacatgcactgccacggcattcaccgcctcatgcacatcattaaaacgggcatcatcggttgcctgtttacgactgaatactgacttcaccatgctgagtaaggtgacacccggctcggccacgtcttcaaactccaattgcacttcaactgccgcagagaaaaagttatctgggtgagacttacgggcggccagtgggttgtgtttggctttggcgctgaattccagcatttcagtaccgaggctggcggggtcatcggtcacggccagcccgaccagataggctttaccggtattagcaaagttcgggcgaatttccatggaggtatagattttctgtagggctttgttcatctgcaccaaatcatcggttgggctgatttgggcgaacaacgcacgcttaccgttcaggatggaatcgtcttcaatggtttctgctttaagtgctgatacatcgccataacggcggaaggggctgtcagggaaataacttttcaaatgctccaaattgatacggcaaccgtagacgcgtggatcaaatgactcggccatctggttgatatcgtcagcgtcaatcactcgtccgtcgcaggtatcaccttcaacgccgatacgaaaatacttagagactttcttagccatgagcggctccatttaatgtgggttgtttggtacggggcttagtttccagactgagggaggcggcaacaacgaaagcccgttgtgacggggctggcacaacagcgaggacgcgcagagggtcgggctggtcgcgtagcctaatggcatgaatacgataccgagcaccatcatcagcgacccacggcgacaggcggccttgctttactggcagggcttttctgtgcgccagattgcggacacgctggccctgaaatcgccgactgtgcagagctggaagaagcgcgacgggtgggacgccattgcgcccatttcccgcgtggaaaccagcatggaagcgcggttgattcagctcatcatgaaagacgccaaagaggggcgggactttaaagagattgacctgttaggccgccagattgaacggctggcgcgggttaaccgctacagccagaccggcagcgaagctgatttaaatccgaacgtagcgaaccgcaacaaaggggagcgcaaaaccccggataaaaacctgttcggtgaatccgctattgaaaagctggagtcaatttttcacgaaaatatctttgattatcagcgcaactggtttgaggccggactcactcaccgcatccgcaatattctgaaatcgcgccagattggggcaaccttcttctttgcccgcgaagcgctgctggatgccatcacgacaggacgtaaccagatattcctatccgccagtaaggcacaggcgcatgtgttcaaaagctacattatcgactttgcccgcatggttgacgttgacctgaaaggcgacccgatggtgctgccgaacggggcgcgcctgttcttcctcggcactaacgtgcgcaccgcgcagagctacaccggcaatctctatcttgatgagtatttttggatccccaaatttcaggaactgcgcaaagtcgccagcggcatgtcattgcacaaaaaatggcgtaccacctatttctccacaccgtcgagtctggcccacagcgcctatccgttctggtctggtgagttgttcaataaaggccgccgcaataaatccgaccatatccaactggatttaagccacagccatttggcccgtggtgcgttgtgtgctgatggtcagtggcggcagattgtcacggttgaagatgctctggcgggcggttgtaacctgtttgaccttaaccagctctcactggaatacggcccgtcagaatatcaaaacctgctgatgtgcgagtttgtggacgatcaagcgtcggtgttcccgttcgccgagttgcaggcttgcatggtggacagtctggaagagtgggaagactacaacccgtattcgttgcggccgtttgggcatcgcccggtgtggattggttacgacccgtcagaggccaacggcggtgacagtgccgggtgtgcggtgattgcgccgccaatggtgccgggcggcaagttccgcgtgttggaacgccaccagtggaaagggatggattttgaggcgcaggccaagcatatcgaagagttgacgcataagtattgtgtggagtacatcggtattgatgcgactaccgtcggtcaaggcgttttccagttggtgcgccagttcttcccggccgcaagggaaatcaaatatacccctgaaatcaaaaccgccatggtgctgaaagccaagcacaccattaataacggccgtctggaatatgacaccggccacaccgatatcacccagtcatttatggccattcgcaaaaccatgaccgccagcggcaaaagttcgacttatgttgccagccgcagcgaagaagccagccacgccgatgtggcgtgggcgattatgcacgccctgttaaatgaaccccttaccgcgacatatggcggtcacagccctaacttcttggagttttacggatgagtaagcgcaaaggccgcaaggcattaagccgacctgtcaccaatcacaccgccagccaacagcagccggtggaggcgttcacctttggcgaaccctccgccgtgctcgacaagcgggaaatactggattacatcgaatgcaccagtaacggtaaatggtatgacccacctatcagctttgacgggttggcgcgcagcttccgggcggcggtgcatcacagctcaccgctgtatgtgaaacgcaacatactggcaagcacatttacccctcatgcaatgctcagtcagcaggcatttagccgctatgcactggattatctggtgtttggcaatgcgtttttagaggtgcgccgtaaccaactgggcgcaccactgcgcctcgaccccagtccggccaagtacacccgccgtggattagaaaaagattgctattggtttgtccagaactggaaagatgaacacctgttcgccgccgggagcgtttttcacctgatagaaccggatatcaatcaggagctttacggtttgccggaatacctcagtggcttaaattcggcttggctcaatgaagccgccacgctgtttcgccgcaagtattaccagaacggcgctcacgcgggatacatcctgtatatgactgatgcggcgcaaagtagcagcgatattgaggcaatgcgtaaagcgatgcgcgacaccaaagggctaggcaatttccgcaacctgtttatgtacgcgcctaatggcaaaaaagacggtatccagattttaccgttgagcgaagtcgccaccaaagatgacttttttaatatcaagaacgccactcgcgacgacctgctcagtgtgcaccgggtgccaccgcagatgatggggattattcccaacaataccggcggtttcggtgacgtggcgaaagcctcacaagtgtttgtccgtaacgagttaacgccgttgcaagaacgattgaaagaggtgaatgactggataggggaagaggtgatccggttcaagccttatgaactgataagcgaggattaatatgggacgtaaagcgccaacaccaccgccatataaccccggcgatattgtgaagaggcccgcgccaccgcctcagccaccccaaaaatgcgaaacgaaacgagtaataattatggaaactcaaactaaccagaaaatcacagtgcaacgggctgttgatattcttaatcaagcgttgtcacttgacccggattgtattactgcgctggtatcgcatcgaatagagtgtaacgcgacgttagcccatgactctgaggtgatgtgtggtatgtctgaaggcaaatacatgactggcgcgcttggcgttatcaactcactggttacagacggctttatcgctgcactgtatacagatgaaaaaaagctggcagcgtttcaagtttgcaaatagttaattgatatttttgaatatcatagccgccgaaccgggcggctttttcatgcccgaaaagtagcaatcccaacacctcgcgccatacaccaccagacgcccgtcacgccctcgtaacccatgaacacgcattgattcccaacccaaccgaacgcagcaccacggcccgcccaagacctataaataagggtatcaaaaccctttgcgcgcaatgctatccccgccacgcctgcgcgctttacaggtcgcttttcatgcacttgcatgaggcattgagaacagcactgggactggcagagacaggaaaaaggaggaagaggatcataatgcaaaataatgcagagtcatgcacaaatcttcttgaacagtgggccactcaaagtggcccaatcaatactaggattgcaagcgaatttgttgctgtatctggattggttgtaaagtttggtagcgttggcgaatgttgttataaagctcaggtgtatcatgagcttttaaagttacaatcaacacataaggtaaattaggtaaatcttcaaccgctgttggcattcccccttctcgcccataatagataacatcaaaacaagggtcattaatgatatctttcttaaaggttttttcactatgcaaagtagtttcccatttatgggcatctcctctttgctcttgttcatcggcatagatactttttaaattgaacagagggaaagtccctccctgattattttgattttttctaaaggtaacaactagcccactacgggtataattaattggatgctcagcatcaaccggcgtagtaaaacaaaatgtagcttttaaagttacatctccactgactggaatatcaggaaaaggaattgatgctctaaggtgctgtgacggttttaattcgccttgataaataaccttaacctcatcatcaccacagtaaataatatctctgatatcatgggggaatttaccccaacctacttcacttctattataaccattatttcgtgagtgatgaataagtaatgctttcgcagttaaaggagtaatatcatattgtaaacttgcagatagaccaatcgcctgacgtagaacgaggggcgaagcaaaacttgttcctgctgttttcactaaaccgttagtgaaagggctatatagcgtaaaaggctcttccgctgaacctccaaaagcaacaccatctggcttcacataaccgggactacgaccgggaccaatacaactatagctacttctctcccaattatccgaaagtgaagttgcagcaccgacagctaaagcatttacaagatctgatggaggttgaattctatttaatccacctgttttctctccatcatttccaactgcaacagtacaaagagtttttcctgtggcaaaatactgctctaatgtggaagtccatacatgaacatcatcatcgtcgacaggtagcctagggccaaggctgagatttatatattggtagtcattggagtctaatactttttttattctcaataagacatcgaaaagatcactatcttgtccattgatagaattatctaatactctataatgatcgatttttgaatatggtataggcaattggttttggccatcagctacagccccaaaaagaatagtagaagtaacatcttgtccatggcttaatagacttccactggttttttgttccgctgtaaacgtatgctctgaaacccacctgtcaaaatctgaacatcctataccaccatcgaaaatagcaactttaatatcattattaattgcattatcatcaggaagttctaattgactattcagaacagttgttctagtaaatacgggattgttaattctaagtcccggtaaatctctaattgttcttaaaaatgaaaactctgcaacctctctagcaattttagagttagctaagattggtagaaaagtaagccccttaattgaaataactttatcttctttaaccgtagcaccacaaagtgatgcatatcggataaatgaattgagaatatcatcctcttcagccggggtatgcaacgctacttcaatagccctttcctgagcagattggtcgatgtttttaatcttgtcattagcatcaaatatttttatctcctctaaagatattacttcatctttctgccctttatttaaagtccctctatcaagagaattataaaaatcagaaaatgacttcgtcgtaccggcaacatatatacaagcagtgttatattcttctttgttcttatttttaacttgttttcgtggtgatatagtcactgatttactaccaatacttctcagtgaaaactgcttaagtatttttacaggaaaatatgactttgcaagaaaagcgggatgcaaagttattttcgcaacagcttcaccatttggttttgtagcttcgggcatgttgtttacgaaatctactagagacctcaaattctgcattataaatggcctattctcctcatatgtataaggtttatttttagggccgttaccgcttttaatatgcacatcaccagttagtgtctcaccataccccaagagcaagtttttgttattcatttcttaatccttaattctgaataatctttctaatgattggccgtgaaattgatagttcagcggatatttgtcgctgagacattccctttttatgcataagtaaaataaactcatctagagactcgccgtcaaacaactcctcaaatattgctttattcacagggatattttctaagattgcattacgttttgcttgttttagggagcgttctatcactgcgaaagagcgcccttttaactcaccactaattttttcagctatagcagttggtatatcattttttactaaaaactcgtgaattaactcttctgttggatattcaaagtttataactctatcaaatctacgccagacagccgggtctaataattcaccatgattcgttgctgcaactaaaatagatgtatgaggccactcatcaatagcttggagtaaaacagtaactaatctttttaattcaccgacatcagaggaatcatcacgtttttttgcaatagaatcaaattcatcaagcaataaaacacatgggaatgaacgagcatattctaaaacagctctgatattattccctgttttccctagaaaactactcatcacacttgctaagtctaatgttagtaatggcaaaccaagtttgtttgcaagccatttagcggctaaagtcttcccaacgcccggaggtccacccatcaaaagagaacgggatggcaaaagcccattatcaattaattgatcttttttctcccactcagtgataaagcgcaacaaactagtcgtaatattcgcaggccatagaggcttaacagttagttgtactgggtaagtttcaaccaatagcttttgtcttgtatcagcatctacaggagttggtaacttacttaagctcccaccacgcaccaaattcatcggcatgctatttttaataagaatatcatttagctctgatgccaactcaggtgagtctttttttagctttcgaatcatgagccgtaagcgcatctcaagatcgtcgcgtttaccctgcaatgcatccgtcatcacttcaacaaacgcatccttagtgatgtttatcatgtaccactccgaaagaaaaacgtaccaaacattatgaatgatataccaacaagtaccatatttacattaattttaaccaatcataagaaaaatgataccattaggtatcttgttgaagccactttgggaattttacattaaaagataaaaatggacttaccaactgccagaaatctctgactaaacagtagacagttctaattttgtcctatgccatctaccacatcagaaatcatacaaatgcagtatttttatctttcacttgtatagcctctgccctcacttctttaacaagttcagcaatccaaaccaaagcaatctcacgatcacggttttgactctcactaccagtagtaagccgcgctatcagatcgattctttcgagtaagactatttcttctaatgaatctggcacctcatccctccgtcacacatataactgtgtttatatacagtatactatgcactttttaagaaaacttctatataaatatatggttttacttgagtaaaaaatcttggattaaaaagcatcctgttgaacaacaacccttttatgcataaaaacagcgaacacagcgcgtcacgctacatatttaattttcagtgtgacgcgtcacaacgatttaactgcactaattaataatctgttgatacctttggtctgccaacacgccgcctcaccccgtaaacaacacccattcggatcacccggcaaggtatcgccacatttgccacaacgttgtttatccagttcagccagttgctcttttagtcgctggttatcttgtcgaatcaggagcgcgatatattccggtaaatcgtaggctggccggaacagacgccgtgtggccatgccctcgattagcatcgcgtactcttctggctccagtcgggcgcggatctcattgataccggcagatttatcacgctggcgctgtgcctgtttgcgggtagttgcggcggttttagtcatggttttcctcacaggtagattaatcatcgaattccggccagtcggacagggccggatactgaataacaatgtcgccgaacgtcatttttgccccacgggctaacgattccagctcccatggttggacgctgatatcttttagctgcaggtcatagcggattttgggaatgcgctggcgttcttcgcgggttaaacgggccgatggcgcaataaggcggcccttggtggggttataactgcgttgcatcttgctaatgcgtggctgattttctttcattcgcgccacaatcgccctcacggcggcagtgtcggtgaagtcaataactgcatccggtgggtattccatcgccatcacaggcgttttagcctgcccgttggggtcatttggcgcttgggtgtttccacctaacccacagttattgacaggactccgaggcgcgccagaggcgctttttaaagtcaaaggctcaacgtcaacggcacccgaaacgatgcgccattgggttatgcgggtttcatgaacacggtcagcacctaaatgcggcgcgtagataccgacgactttctgtacttcctcgtcataggcgttgagttcatcggcgacgcgcttggctaaacggacagtctgatttccgcaattggtgccaccttgcgccgtgatgtaggcagcaaaatcaccctcgtcagccgcatggcgcacagcctcaacggtttcgtcgaaagtctcggctagactaatagaacgaatacggcggcactcgcgataaacgcccatggagggcagaccaatcgggcggaattgagggatacgccacgttgccgcccacgctgtcaccgccgcagcggagtcagttagaagctcgccggtttcatggtcacgttcaccctcaagcgcatagccgtcgatatttttggcaatgtatttagcgatgtagccagcggccccgcctttgttcatgtgcttgcattcaaagcggtatttagcggctccgcgctcgtcactgtcttctttcaacgcataccggcgcatgacgtcgataatctgttggcgctggcgacgctcacaaaacagcatcatgtgccagtgcggggttccgtcgtggtgcggctcaaccacccgcattccgtagacgcttaatttattgtctttaaaggcggtacgcattttgctccaaatgttgcagagataacgctgtccgtctttgggggaataggcctcatcgtcccacttgtggttaagctggactttctcgttatcccctttaccgataacgcgggtcgggtgatattttgacggggtggtgatggtcaggaacatgccgacgtgcttttgattggcagcatatttttcagtaaaagcaatggtgttcattagctccatacggcgaatttctggattagaaatactcgccatcaccttatcaatcaggtcgatgcgctcgccggtttcaatgttttctaactggcagcttttgagatattccaaattagactgacgacgagcgaacacctcacggatggcctgcttactggcataagacgacgccgacatatctcggctaacattaccgacagcaatcaataatgcttcccgccagcacatacgttgggctttaagtttccgctcccaccattcgggattaaccagtcgtgacagactggcgatagcagacgtgatatctaaccggcctttccggtatttgcgccagtgcatcggcgtgatattaaaagcgcgcgccattttggcaatatcgccgtatatccgtacctgtgtatcagcctgcaataaaacagacctgtcaccctgattggccttaatgcattcatcacaatgatggttgtacgccaccattaactcatcacctattttgcgggcaaagcggcgcagctctttatcatgcatacccgctaggctggcataggttggtgcatcagtggaaaagctcattgacgcactgaggcgcataacatttttactattgaccacctgaatacgcggccagatacgctggtcaaaaacaaacaccagccatttattagcatcgtttagccctttattggctaacaggtattcatagcgagaaatgaactggatacgcaggaagtgaggcaaattattgatattggctaaaacagcttgcccctgaatcagttgttcacgggtaagcggtcttgctggtgcaagggtttggcgtggtttgctgccggggtaggcataggcaggaacagcagcgccgctgcccggataaggcaacggcgctgctggggcaatgcgaccgcgcatattattagtgctggtcataagactgagtgattatgtgttcagcgatttggttaagcagctccgccgcctctacaccgttcaattctcggtttagaatttgattagcaatctcatccaaacgaaatgaaaccagcgcggcctgattctttctttcatccatgcgcgcttcatttagcattagctccactgattcaactgtcgtcattgttactgtactctcactgcccggcttggctgggtctacacccacccatatattttgtgctggatgagtgttattcaaaatgggatatctccatcaaaagaataaacatcgatagagtcgatgccatcaaatgaaagcatgacaaaattaggcgcagcaaaatcacatagagtaatatctgtaacttctaccacgactttacgcccggtatatatatctcttttaaaatcccactcagccaaaagcaaataatcaccaatagagtaatatcggtcatttttccgtaactcagctttttttctcccatcaattacagcttgataatactcaggcataatttctaattgatgaattataggtgatgctgtacattccttttcttttccccctgttattttattgttattttttgacttcacataaattaggtttgctgcagtcatagcacttgataaatgcccccttaacttaacctcattcacttccctatctatagggcaggtagttctcttaagatacgaaaaaacatcaccagcacgctcaatttcttccagaacggtatatatatctgtctttttcatttctataaccttattttaggtaatggaaaccccggcgagtaaaacgccatatatttcgattttggttaattaataatattcagtacgcagtcatcattactaataaatgacggtaacgaacgagtgaactcaattaaataatttaatgcttcaacaacactctctctttctgttggactcaattctgaaaacttcatattcacatgtcgtttttttaaaccagcatgaaagcaaattgttttacgcaaatgcgcaggcgacttatcaaaagcctcttgagcaatattctttctattacggaaatgtgtttcttttaattcagcaatacgagtaatacccgtcattcttaacttttcagattccgttaattgcaacatataacccccaattaacgcccgaacagacggcgtaatattggtgtcttctttgcagaggacagttcttgtaaaagcgccttttgattacttcccggcttccagcgctggccgctcttcaactccagcacaccgttaccgaaatggcgcaggtttaccgggctttgctgttttaacaatggggcaatagtaataatcataaagacacctcaactcaaaccggcgacagcactcaatccgctaataacatcaacggttgaagcaagcgcaggggttgactgaatacgacattgtaccgtcaggccaattaatgacagatggcgaatcgctgtattgaccgtatccagcagtgacgatttacgggaagcggtcttatgatcgccttgaacagcagcggcggcaatcaagccaacggcagcggtagcatgtagagcataagttgggatattaccgggacaggcttcattgactggcaccgatggcatgcaattgatttgtgccaacatggcatcaatcaagctggcgtcttctgttgcgtcagtgatcgcaagcaattcagtaaccgtaagatggtgtggctgttccgggttcagcttgttccgcaacgtttgcgcattcatatccaactgtttcgccaactgcgtcaaattgtgacgtgtcggaaactggcggcatacattgtcaaagtgcggatgtttagaaacagaaaaatcaaacatgtcacatccttaaaattcacttaaagtgaatacagattatcaatgatgagctgaaaacgagcatgaccgaatgcattgcgaagttgttcttctttccaacgcgcatagtaaatacgaatcgggccacctgctctcttacatcccttgcgaatcattcgcttttcaattggtacgcgagggttatcgccagtcgtccaacggtaagcggtacgttttgaaacaccctcaagttttgcgaacatttctaagctcactacaggagcaggaatttttataattgcgatttcagaagccatggtgcatgattccctatttgccaaagtttgtaagtgatgcgcctctgtttgccaacaccagccatcaattacgtaggtttagccaaaatatatctccatattgggagatagtaaataggttttgtcaaaatgagaattgattctttaggatggagcaacgtagatgtattggatagagtctgtttggcatatggattttctcagaaaattcaattagctaaccacttcgatatcgcgtctagttcgctgtctaatcgatacacccgtggagctatctcttacgactttgcagcacactgcgcacttgaaacgggggcaagccttagatggttattgaccggagaagggcaacaatttgaaggtaagtcttcatcatcggatacaaagagaatagaaaaattcacattatgtgaagaaatactcaaaagtgatggttatctgagtattgatgttcagctttttgggaagcctttatctgatggaattgctgttcgcactgatggaaaacttcactttatcgataaagcagcatcgttatcggacggtttgtggttggttgatattgatgagtctattagcattcgtgaactaacaaagctaccgggcaaaaaattacatgttgccggggggaaagtgccgtttgaatgcgggattgatgagatcaaattgatagggcgcgttacgggtatttacagcgaggttaactaatggctgtgcgtaagaaccctgctggcggctggatatgtgaactgtatcctaacggatcaaatggcaaacgcatcagaaagaagtttgccacaaaaggtgaagcactagcgtttgaacaatacaccgttcaaaacccgtggcaggaagaaaaagaagaaagacgcacattaaaagagctgattgacgcatggtatagcgctcacggcatcacacttaaagatggcctcagacgccagcaagcaatgcatcacgcttttgactgtatgggcgaacctcttgcgagagatttcgatgcgcaaatgttttcccgttacagggagaaaagattaaaaggtgagcacgcccgctcaaacagggtaaaggtggtatcaccccgtacactaaatcttgagctggcttatttccgagcggtatttaacgagcttaatcgactcggtgagtggaaaggtgaaaaccctttgaaaaatatgcgacctttccgcaccgaagaaatggaaatggcctggctaactcaagaccagattgcattgctgctcggtgagtgcaagcggcatgaccatccagatttagaaaccgtagtgagaatatgcctcgcgactggcgcgcgctggtctgaggccgagagtttaagaaaaagccagctcgcgaaatataaaatcacctacaccaacacaaaaggcagaaaaaaccgcaccgttcccatcagccaagagctttatgactctctgcctgatgataaaaaaggtcggttgtttagtgaatgttatggtgcgttccggtctgcattggaaagaacagacatcgaattaccggcaggacaacttacccacgttttgcgccacaccttcgctagtcattttatgatgaatgggggcaatatattagtactgcaaagaatacttggtcatacagacataaaaatgactatgcgatatgcacatttcgctcctgaacatcttgaagatgctaaactattaaatccattggtaaaaaaatgacaacactcgaaaaaataattcaatttatcaaagagcacaaatttctttctgtaatggtagctctaattactaccttcattttggcgatccctctcatactctatattacgaaattcaatgcttcactatccactgaccccaacaaatgggctgcatttggaacgtatgttggaggcgtatatgggccaatagcaacaataattagcattgccgtattaatccttaccgttgtagaaattaatcaatctaataaaattagtattgcggaagcaagaaacaataattttatcaatgagatagtcaagcttacagagatattatccaactgcctagataaaaaccctctaataatagacagaacttacttatttaaatggtttaataagcagatggtttcaaaatttgaaaaaaatcaccctgcagatgaatatgatatttggaaagaatgtataaaaaagttcactaatgatgaactctctcttttcgaaaatgaagttgcaatcacagaagagatactattaagaatccattttatagtggatgaagatctaaaagctagagctaggggtatctttaaagggataatcactaacaatgaacgattctggctcgaatgctacatacgtaggtttaacttccctttggttcattttttgtccctatggaactccttcagcatagttcctaaaacgttaagtgatatgatcatagacaaggaacttgaagagtttattcaggaatacagtggcgatatagtggcgatagatatggctaacaaacggtaataaatggcaaatagatgcaaactatgtcaatgataaataacgcaaaccattgattttcggttgttactgtaggaactcataatcgcttggtcactggttcaagtccagtaggggccaccaaattttagctgttaaatcagtatattaagccacttcttcgagagtggcttttttgttttaggggatttttttgtttttggggctaatgcccccaaagtgccgccagccaccagatctgcggttcgcgacgacagtttggtgctttacctattaaccggctttacctatttacctatttacctatttacctatttacctatttacctatttacctatttacctattttatcggcttaaccggcgatctctggtttttacaatttagtcttgcaggcctatctctcgttacgaaccttctgcgcggtagcacttctcatacagtttgccctggacgtaataccagagttcgttatccgaaataacttgtattgcctccggctgcccgctccccaacacatggtaataaatgctgccgtcttctttcttggcatagaaaatttcgtgtcccggacgctgtagcgataacaggttggcgtccctcgtcatctcaaggtgctcaaccttgctgtcaaacatctgattttcgcatacataatcactggccgatgcctggaaaacacataacgacatcgcagccatacccaacttccacaacattatatttctccctaacacggataggcttcctgagataaaagctatcacaatgataaaaaataataacctaaacgaaagctttaatataaatacctacatttaataatacatcttgcttatatctcatctgccaaacacccttaaatcagattttttcccattttttgtcctatatttatacgtgatattaacctgtgcaatggagccctgtgtttgggagataatatgaaaaagaaaatcttggttgttgtcaccagcgttgagaaataccctactcttgagcgcgcaaccggcctgtggcttggtgaagcagtgcattttgtgaaaaaactgcagaatgctggctatgaaattgactatgtcagccccaaaggcggctacacgccaattgacccccacagcctgagcatggcagataaaaccgattgggagtggtatcaaaacaaggactttatgaataagctcggcgcaacgctgaagccagaagaaattaaaccggaagattatgacgttatttattatgccggcggccacggcgtcgtgtgggacttcccggataataagccgctgcaagagatcagccgtaaaatatatgaaaatggcggcattgtctcgtcagtatgtcacggtgccgttggcctgctgaatattaaactgtcagacggttctctgctgattaaagataaaaccgtcaccggcttcagtaatgaagaagaaaagctggctgagctggataaatatgtcccgtatttgaccgaaactgaaatggttaaacgcggcgctcagtaccaaaaagcagacaaagcatgggacgctttcgccgtagctgatcgtcgggtgattaccggtcagaatccagcctctggcggtgcggttgccgacgaagtgctgaaagctctaggcaaataagtacaactcgtgcggtttgatccgccgtgataataagccactctctgcgagtggcttattagtttctatccgctatatcattgcctcaatatcatcaattctggctcatcttaatgaaatctgaagccttaaaaacccgcttacgcgggcttatgaataatgacatcactttggataattaacttttgcagtcgttaatccgtacatcgtttttatagatacagtttgaaaccagtttgccttcttcattccagacctgcgaagcgccctcctgtttaccagcaacataatttgtcaccatctcttttttaccatccgcataccagcgttttacggcaccgttcaattcaccgtctttataaggtttttcttctttcaactggccgttggaatgccactgtttcagaacgccaacctctttatgatcgttatcccactgccattgcagggtttgcacgccctcttcattccattgacccaggctacgctgcgcgcctttaacgtaaaagtctttgctttcaaccttaccatttgggtaatagctgatagaccaaccttccagcttgccgtctgcgaatacctgttcattacgtaaggtgccatcttcgtaatagcttttcgtcggcccatgcggctgcccttttacataggggttgctgctgcgcacttttccattcgggtaatattccagattagtgccgtcaaaaacgccgccccgataactaaatttggcggataacttacccttttcgtcatagctctcatcaataccatcaaccggtttatcattatggaaagtgctggatgtcgccttgcgcccgttctcatgataaagagtggttaaaccctcacgtaagccattggcgtctaagctgctgtctacgctgactttgccattgctgaagtaggttttatagggatgaaccattttgccggaagcaaaatcttccgcatcaatataaccttcaacgtgtagtttgccggtgttgacgtcgtagacttccattttccaggccttcagcttttggtcataaggcattggcattttttgtacgtactgagcgtcagcttctcttaccggctccagttcttcactcagataaagcatgcctttagtaaccgctttaggagcaaactctgggcaagtttgagcattgcaatcgtcagcgccgtgtaccatggctacgctgccctgacagtcagccagaaacatcagcattggagtttgatcgtccatcaacgctttgagcttgcccgcaactgagccaaactctttggctggcgcgccgatagactccggcgtgatgtaggcaatattgtttccgcaggcgtgcttggaagacagcgttaaccgcagcgccgggccgctgtaatccatacttgccggtaattttgcgttggcctccatgccaacaataatcgcaggatggtgagtttccaaacgcgcagccgctggccacattaatgcgatgctcagtgccgaacccacgcaaagattccagtgtttcattgactttcagttccctctaaggtgccgtttacggctaatttaagtgccaagctgctggcatatcgaacgcaatgtccgagttactctcagcagcgctatacaggctgctaatttttatagtgctattctattcgttggcgatattcatataaccagtcaattccagataaccaaagaatagagcgcaataatgtgaattatttatgattacgatgcagaaacgcacgaatgaccaacgtgccgtgcaccgtgagcatgctcagcacgattagtgccagccagaacgcacctattacctgccagggatgttcctcgggctgcaccaataccacaggaatagcgtcttttgataagccggtagcgccaataaaggacacatgatgctcaccggcgctgcttgcctgcgaacggaaaaaagccagaatgggcagccatccccccactttctcaggtggttgcaccaacaggtcttcccgattcaatcccacaatttttaccgcatgttcactgggaacaaaggacgcgacctgtttacgcagcaccggacgtatataaatccccatggcatccgcgctttgatccaacatttcgactttatgattactggggaatgccgcaggctgctcaaacgcccccaactctgacattgccagtaggtcataccaatcgtctgattccgtgccgtaagcgtcgttaatgctgattctcaggcgatctttcatatagttacaatcaacgttggtacaagcagtgttaatcattgccaacgcctgaggaatatttgccaaaaaaccataatgggtatcatcaacatagaattcaccggtcgccagacgcgccacggtctcatccaacggaatgatcggtaacgggtgcggagcatcccaaatcaggcggctacagtctgcatagacttcgcgatacggcttttgtgagcgagtttcatcggtgacgttaatggtttcaggtaaaatcatttcacagcgcgctgtcccttccaccgtaacccgctctcccggcggcaactgagcgtcccgtaaagccgtagaagaagtaaaatgaaccggttcgctacctgcaagttgatgataacccagggcaatccgagctaaaggcgcccgccattcgctccacgccacgcccagtaccagcaacgccacaatcatgatggaaacgtgatggcgccagaaccttggcctaacgttattcattccctgatcgatagcccgaccattgaaacgtagaacggtaaaatcttcggtactgagatgaacctcaacctcaccggcaggtgccgttacagcgccccaggattcagggaataccagcagcaggtggtctcccagccatagcaaaccctcctgctcatacactttccctcgcataatgttcaccgcgccaggaaggccgcgacgacgcagcagcaggaaatacccgagcggcagaaggcacgcagcagccccccaccaggcgatgatccactcggtggtcaatgtgctggccagtaatgctcctaaacctagcagaatcagaaacgtaggaaaaatacgccagccggaacctttgcgcagaataaattcactttcggtttctttgcgctgcctgattagcttgattggctcgctggaagaatcttctgcaatcgttcccggcgtacccttggcccagttctcccgcacggtttcagcgccgataagacgctccagtccctcttcaatcctgaaactgttgttgagggaaacaaccaacccaatgttgccgataaaaatcacttctgcccgattatggggctgtagaaacgcatctgggtcaaagggtaaatacacctcgacgccacccagagtttcatgctttacctgcccgccgccgctcaaaccgtggctggaatactcaccttcgataatccgcacgtcatgattattcagatcagacagatttggcggctggcgaaatggatccaatagcagcagcttatccgtcaccgggccgaaagttatctctatcgcggcgagttccgcgctggtcaggctgcgcacgacaggaagttgacgagcctgccgcagtttaaagcgatcgcgaaaacgcctaccgccatagatcagaacagaaataagggaaatagcgcagataaccaacggcaaaaactcgttaaaactcataatcctttacgactccagcttccatgctcaataaaatgttatcggctacacagaaaaatctaaaaccggtatcggcgcattaccgaaacacttgaaccttttctatcaatggatagagaggaaatattctataagcggctaatttaaccgacacatttatttacacggcgcatattatcagttcctgacaataccgaaagttatccttttctttggttctcatcttttattccttattttttataaggataaacaagtcttttcagccctatctgcgctttcaccacctttatgttcaaaaaaacgataacctgcggcgctccttaaaaccgcatattcatgacggctatcacattcgctacagagaaatttcccaagccagaccacagcgtctagattgaaataaaaatctcatccgaccacttgcccgagaagctgcgaggaggggaaataataataacaatttggtggtatctaatatcaccaaagcactcgatggagactgcaatgatcgcttatcccaacctgctcgccccgctggacctcggctttactacactaaaaaaccgcgttctgatgggctccatgcataccgggctggaagaactacccgatggacctgaacgtatggctcggttttatgccgaacgggcagctgctggcgttggcctaatcgtgaccggcggtatcgcgcccaataaaaaaggggtggtttatcaaggcggttcgatgctgagcgatgaaggtcaggtggctcatcatcaaattgtcaccgatgccgttcatcaggctggagggaaaatagcgctgcaaattcttcacgctggacgctatagctaccaaaaacagcccgtagctccttctgccctgcaagcgccaatcaatcctttttcacctcaggcacttactacggaagaaattgaacagaccatcgcggattttgctcgctgcgcgcggttggctcagctggcgggctatgatggcgtcgaaatcatgggctcagaaggttatctgattaatcagttcctcgccgctcgcaccaatcaacgtaccgatgaatggggcggaagttttgaaaaacggatgcgttttgccgtggaaattgtgcaggcagtgcgtcaggcaaccggtgagaaatttatactgatctatcggttatccatgctggatctggtagatgaaggctcagactggcatgaaatagaacaactggcgctggcaattgaacaagccggagccactctgattaacaccggtattggctggcatgaagcccggattccgaccatcgccaccatggtgccacgcgccggatttagctgggtaacgcgcaagttaatgggcaaagtcacgatcccattgatcaccaccaatcgcattaacgatccggcggtcgcagaaaaagtgctggccgacggctgtgccgatatggtttccatggcacgccctttcctcgccgatccggaatttgtccgaaaagcggcagaaaaccgagcggacgaaatcaatacctgtatcggctgcaatcaggcctgtctggatcagatatttgaaggcaagctgacctcttgtctggttaatcctcgcgcctgccgcgaaagcgagatgccgatacaagtgacacccgtacccaagcgcctggccgttattggctctggccctgccggtctggcttttgcgactaccgcagccagccgcgggcatcaggtgaccttatatgacgcagccgaccgcatcggtgggcaattcaatatcgcccgacagattcccggcaaagaagaatttaacgaaactttgcgttatttccggcgacagcttgaaattcaaggcgtgaatacgatgctagggaagcatattcaggctgcggaactggcagagtttgacgaagttattctggcctgtggcattgtgccacgcttacccgttattgagggaatcgagcacccgaaggttctcacttatctcgatgtattgcgtgataaaaaaccggttggtcaacgagtggctattatcggcgctggcggtatcggctttgatacggcggaatacctcagtcaatccggggaatcgaccagcctgaacagtgaggctttcaacgccgaatggggaattgaccaaagcttgaatcaccgcggaggtttggctcctcaaggccccgaactatcgccttctccacgccaaattttcctgttgcaacgtaaagcgagcaaagtgggcgaaggattgggaaaaaccaccggttggattcaccgcaccagcctgaccatgcgtggcgtaaaaatgctgaatggcgtgagctatgaccggattgatgatgaaggtttacacatgacccgcggcgagcaatcgacctgtctgccggtggataacgtgattatttgtgccggacaggagccacgcagagaactgtatcaaccgctgctggatatggggaaaaaggtgcatttaatcggtggagcagacgtggctgccgagttggatgcacggcgcgccatcgatcagggcacgcgattggctttagctatctaatattgcggatcaaaaaggggagcctcagctcccctctgcacgattaaaaatcgctgtaagacatatccaggctgcctgagccgccgccctcggaacgagagctggagctggttttcaccgctttcaatacgacaaatttctgattggaatcgatggtttcacagttaccaaacaggcgattcagcttatggtagtagtccaaatgacggttaccaacaatcattagctcaccaccggttttcaggcaacgtttcgcatcacaaaacatctgccaggcgacgtgatcactgacggtatgttgttgatggaaaggaggattacagaagaccatctgcaaactttcacgttctacgccagcaagaccgtggctcaccataaactcgcagcgcgccagatcctgcggcaaattgcgctcaatattcaaacggctggaagccaccgccatataagactcatccacgaacagcatttctgcatccggattctgctcaacggcaatcagcccgaccacgccgttcccacagcccagatcggccatttttccactcagattgtacggcaggttttccataaagaaacgcgcgccgatatccagattgttgcgagagaaaacgttagcgtgattatgaattacataatcagtgccgcccagcttccaatcggtggtttcaggtgtttctgtcagcggtaaatcagccacttcacagtgaatcagtcgcgcttttttccatgccaggctggttttggttgggcctaaaatacgctcaaacagctgcaaagtagaattgtgtacgtcacgggctttggcgccagcaataataatggtatcgggagccaccacgcgacgcagcgcctgaagttgatgttccagtaatgccaacgctttaggaatcttaatcacaaccaacgccggagcctcaggtaaggcatccatactgctcagcaaagtcaccgcgttatcatccagacggttcaaatgcagattgtgcgcggtacccaactggctcatataagaatcgctgacgctatacgggttggacgcgtgtaatgcacaggccaaagcaccaaattgatcgttgaacagcagcaccgggcgtccgccaactttactgatgtcgatgttttttaacagatattcatctgctgcttcccacgcctgtaggttgctggaatcttcctgctgtgggaaacgttcaagtcttaggctttgcgtttccagatcgagttggctcatcgccgctcctgaatgataaatttgggctgtttatcccctaaaaagggcgatcagtaaattgttttttcgtgaataagggttttattgatactgggctaaccagaggggaattcttcttatagttatattattgatgcatagagatatatttaaataacgaataaacctcaaaaaattctacagtttatcccatttttagttctctaaggatattgcagctatcaaatcgaaataggcaaatatacaatccgccaacttattacaatcggaaaggttatatagtcaataccgataatacattattaatgaaacaaattaaagaactaattaatgggaaactgcctgtgcaattttctatgcttatccagcaatataaccacggaaggtactcactcatggatctattcagcgctttgccctacacaatcccgccaagttcgcgtttataccaaactcaacactctaaagcctttcatcgtaattggtgtgccagaggcattgccattgcgctgttggcaatgagtagtgctaacgccagcacgacttcttgggcttctctgccgaccttcgagccacctagcgcactgagcattcagcctcaggctgtttacttgtcagcagctactccccattggcctactgcaactccgcgctggcctgctgctgctccccgttggcctgccagtcgaatcgatactcctgtcaatgatgttgtggaaatcatcacttctggtgttgaacatattcatgagttcctgatcaaagaattcaacaatgaactttatctacaatttaagattgcaggtgctctatcctctataacgccacttaatcatttatctcctgcgttaggaattaatgttactgatgatcttattacagaagaaaacatttataaccatatcaatagctcggccagtcccaaatctattgatgcatcttcagatgaagatatgaatcaaaacaaaacaaccgaagtagcggttaataccccccctcagcatgttgatgtcgttcccaacgacgtaatacacccggttgtgattaatccaaatttgaataacgatatctggacaatagatgatgagtccatcattgaaagtttatctttgagcaataactcaaaaatagtcattttgcccagcagcgaactggggagttatattttttacatgaacgagtaccaatctgataatagccaaaatgaaatacacttccacacacaaattggtaataacgaatacccaggtggatatctttggattaatagtgacagcgcaggcacaacttttgtcactatccataatcaccgagtcaacgaatcaataaataaacacgatcaggatattcaactcatagaggtttcaggcgaaataaaaggcaactttattcagcgtggtcgcgttatatccggcgcttatgattatcgattgttacgcgacgggccagctggcaaaagctggtatctcaccaataaggtctccctggatcctaaagtggcaaactctaccgcacgggtgtaccgcccagaagcggcaggttatatagccaaccagatagccgctaacaaactctttatcagcgatattcacgatcgctttaatcaaaccgattatgtagatcctctcagcggccagaaaatgacgcccccaatgtggatgaaaacatccgcaggtattcatcgttttaaggattcatcgggccagttggccagtaaatccacatattcctctattcagttaggcgatatcttgaaccaatggtcaaccaacgataacgatgttggatactttggtattactggcggatatggaaaggccaatgctaatagcgaatcgaatattaccggttatcgcgcccattccaacactcacggatataacttggggctttacaccacatggtttgccgatcgctccactaagctaggtgcctatattgatattctggggcaatatagctggtttaaaaatagcgtcgaaacccagggagaaggtaatgaatcatataaaagtaagggatttactacctctatagaaactggttttaaacacccactgattgatcaggaacagtttggtttatttatccaacctaaagctcaggccgtttggcagggaattaaagctaaaaatcatgttgatgcttatggcacgctgatttcacctaaagacaaccaccattggatgacaaacgtcggcttacgcagttatatgcagatcaactctggcacgctgtcggagaaacgcacactgtcagtcaaaccttatctggagacaaactggatccataatagcaaagctgcgggaatcattatggataacgcaaaaattgatcgttcgggtggaaagcatatcgcagaagttaagttaggtattgaaggcatctttaataaagatcttaacatctggggtaatttaggccatcaaatgggcaaacaaggctactctgacaccaatgcgggtcttggcatgaaataccaattctaaacggcctccagtgccgggcgcgcactcaaaacgctatcccggccttggtgcatttttgtttaatttagctgaaaacggtactatcggctgattacttccaacgtaaagccatcatcgttaaaatcctaacggtgaggcttatcagccagagcatactcagatgcaggaattgacctatctgcaaggttatcccgaacagttgcaaacccaggttcgtcagttaatcaccgaacaacgtttggggcaggttcttcgcagccgttatcctcaaccgcatgattacaatacggataagtcactttatcagtacaccatggatctgaagaaccagtacctgcgtaacgctcaaccgctgagcaaagtggcttacgacagcaaaatccaagtaatgaaacacgcattggggctacataccgccatttcacggattcagggagggaaattaaaagccaaggctgaaattcgcgtagcgacggtatttaaaaatgcgcctgagcctttcctgaaaatgattgtggtgcatgaattggcgcacttaaaagaaaaagagcacaacaaagccttttatagcctgtgttgtcacatggaaccgcaatatcatcagttagagttcgatacccggctttatctgacccaattatctctgtttggcgatatttactaaccgcttaattgacctaacggcatcaataaattctcatcgtcagccctttttctggcggcggttcaatgactgacacagtacacagatacggagcttttatgattcgctttgctgttattggcacaaactggattaccgaacggtttattgatgccgcccacgcaagtggcaagatgtcgttggctgcggtctactcacgtcaattggagcaggcgcaaaatttcggcaataaatttggggtcagcgcctgttttcattctctggaacacctagcccagagcaacgaggtagatgcggtttatatcgccagccccaactctctgcactattcccaagccttgctgttactcagtcataaaaagcacgtaatttgcgaaaaatctctggcctctaatctggccgaggttgaagccttaattgcctgcgccaaaaaatatcaggtcatactcttcgaagcgtttaaaactgcctatttgcctaattttattcagctgcaaaatgcgttgcccaagttaggccagttacgcaaagcctttatcaatttttgccagtattcctctcgctatcagcgttatttaaatggcgaaaatcctaataccttcaatcccgctttttctaacggctcgattatggatatcggctattactgtctggcaagcgccatcgcgctatggggagaacctcagagcgtacaggctagcgccactctgctgcccagcggagtcgacgctcacggtacggtctgcctgaattacggtgaattcgacgtcgtattattccattccaaagtcagccaatctcatattcctagcgaaattcagggcgaagacggcacgctagttattgaaagaatctctgagtgccacagcatcacctatactccaagaggtcaggagatacaggatctgacgctaccgcagtatgaaaataatatgaggtatgaagctgaagccttcgccgatttgattgctaaaaatcaggttgagcatccaggtttagcgctttcagtcagcaccgcgcgccttcaaactgaaattcgtcgccagactggcgtagttttccctgcggattcgcagcaagcatcatcattaaaatgaataggtgtgattgaccaacgccctcttttgaattaattttggtgctgcaaaggggagtaacttcattgccggtttgccgtcattacggtgcgaaagcactcggttaccgggcaacctcatcatgtagaagcaattaaatcgcttttacatcatcagggttgtaagtgagaccttgccggaaggcgaggtttgcttgcagctcagacatagcggctggcgtcttccgacgttggccgttttgtttttttatgaggtttactctgatgatgaactccgttggtacgcccgtactttgggtcggttttgccgttgtagtcgcgattatgctcgccgttgatcttttccttcagggccgtcgcggctctcaaaccatgacgctacgtcaggccgccgcctggtcgttggtatgggtgagcctggctatgctgtttaacgccggtttctggtggtatctgagcgaaagcgtagggcgcgaaattgcggataagcaggcgctcgctttcctgaccggctatctgattgaaaaagccttagcggtcgataatgtctttgtctggctgatgctattcagctattttgccgttcctgccaatctacagcgacgcatcctgatctacggcgtacttggggcaatcgtgctgcgaacggcaatgatcttcgcaggtagctggctggtttcgcaatttagctggattctttatctgttcggtgccttcctgttattcaccggcctgaaaatggcatttggcaaagaggataacagccccattggtgataaacccttagtgcgctggattcgcaatcacttacgcatgactgacgaactccacggcgaacgtttcgtcattcgcaaaaatggtctgttgtacgcgacacctttggtgctggtgctgattctggttgagctgagcgacgtcatttttgccgtcgacagcattccagcaatctttgccatcaccaccgatccctttattgtgctgacttctaacctgttcgcgattctcggcctgcgcgccatgtatttcctgctagcaaacgtggcggagcgcttctcgctattgaaatacggtctggcagcgattctggtgtttatcggaatcaaaatgatgatcatcgatctgttccatattcctatcggcatctctcttggcgtagttgccggtattctagccctcactttactagtgaatgcctgggtgaatcaccgcgccgatcaaaatacaccacactaactatgtgactatctgcctgataatctattacacggggtgtctgtcaccccgtatttatttggcagataccactaatcgccaaatgttatcttgatcacacatatgtaaacaaaatgttatgcaaagtgatcaacattatatttccctaattgtttctttccagcctattccattcccttatactaaccctgcaaacacacttggttacaggtttgaagaaaaagtacccggtcaggttccggccgaggtatgaagcctgtacaacgtcattcaacacagcgacattcagttcactgggaagaggtaaattgatatttatggaaaacaaaaaatcagggctatttcactacttaagccacggaagtctggttaaacagatattggtgggtttggttgccggtatcattctggcaagcgtttcacaatcagccgctgtcgcggtaggcctgttaggcaccttgtttgtcggcgcattgaaggccgtcgccccggtattagtattgatgctggtaatggcttctatcgcaaatcataagcagggtcagaaaaccagtattcgccctatcctgttcctgtacttgttaggaaccttctcggcggccctgattgccgtcgccgtgagtttcatgttcccttcgacgctggtattggcaaccaataatgccgatatctcccctccgggcggcattgttgaagtattacgtgggctattactgagcatcgttgccaacccgattcatgcgctattgaacggcaattacatcggtattctggcttgggcggtcggtttaggctttgctctgcgtcatggctcagagactaccaagtctttgatttctgatatgtctcacgccgttaccttcgtggtacgagtggtgattcgctttgctcctctgggtatttttggtctggtagcttctactctggcagaaactggcttcggcgtattactgggctatgtgcaactgctggtcgtattgatcggctgtatgcttctggtagcactggtggttaacccactgattgttttctggaaaattcgccgtaatccttacccactggtgtttgcctgcctgcgtgaaagcggtgtaaccgcattctttacccgtagctctgcggccaacattccagtgaacatggaactttgtaaaaagctgaatctgaacgaagatacctattcagtttccattccactgggtgccaccatcaatatggccggcgcggcaattaccatcaccgtgttgacgctggcagcggtacatacgttgggtattgcggttgatttgccgacggcattattgctcagcgtagtcgcggctgtgtgcgcctgtggcgcttccggtgtggctggtggttcgttgctgttgattccgctagcctgcggtttattcggtattccaaatgaaatcgccatgcaggtagttgctgtaggctttatcattggcgtattgcaggattcggcagaaaccgcgctgaactcctctaccgatgtgctgtttaccgccgcagcctgtcaggctgacgatgccaaactggctaatccagacccgctggcaacgcgttaaatctcaagattctcacttatccaaagggtggcaaaagccgccctttttatcctttcttttcgaccagaaaaggatcgatgccctgcaattgcaagcgacggaagcggatgatattaaagccgttaatcagcaggaaactcccttcaatcagcgatccgccaatcgaacccagccagatattatgaattacccaacaggcggttgagcaccacataatacagcgcgtggttaagccgtgagtgcggaacagcgcccaagtactggctacggtgccaattatcggcaaaagctctactacgtgatgcattcgccacaaacctaacgttagtgtcagaatgataaacacaaccatcactatgctgctacgagtcttggtcgagatcagggtgcgtagagcgttaagcaatgcactgctgcctgctgcactggctcccatcagaaagaaatggccaccgatgatggcgctataagccgaaagttgcagtttgaaacgtcgttcatcccggttgaaaaacatggtaataccgacaaaaaatgccaatacgccaacagcttgggcaaaccaatagaacgtcatggtggggtattcctggtataggggagtccctatctcttctggagtcgaacatagctaaaacgacgcgcttaccgctaatcggggcccacggtaagcgcgcgaaaaatgaaatgtcgttttattttaatggttaaccatactagttacaaggtgactccgcttttaaaaatagctaattcacggaaatcattggcttcattgcgcgccggtttgccattggcaatggcgacgatcagttcgacgaactcttccagtaaaacatccattgaagtccctttgattagttttcccgcatcaaagtcgatccagtgaggttttttcgccgccaactcgctgttggtagccagtttcaccgtaggcacgaaaccaccataaggcgtacctcgaccggtgctgaatagcaccatatgacagcctgcccccgccagcgcactggttgccaccgcatcattccccggagcgctgagcaagttcagccccggacgttgcaggcgctcgccgtacttcagcacgtcgaccactttgctttgccctgctttttgggtgcagcccaacgatttttcttccagcgtagtaatgccgccagccttattacccggtgacggattttcgtaaattggctgatgatgagcgatgaaatactgtttaaaatcattcaccatgctaacagtcttttcaaaggtagactcatcgcgacaacggctcatcaaaatgcgttctgcaccaaacatttctggtacttcagtcaaaaccgaagtgccaccgttggcaatcacataatcggagaaacgccccaagagtgggttagccgtgataccggacaaaccgtccgaaccaccgcattccaggccaaatttcagttcgctgagttgacccggcacacgcgggtcgctgcgcattacctgatatagttctcgcagtcgttccaagccagcttccacttcgtcgtcctgctgctggcacaccataaagcgaacccgctcattgtccacttctcccagcgtagtttggaaaacgtcgacctgattgttctcgcagcctaaacctataactaataccgcaccggcattaggatggcgcaccatattttgcagcatggttcgggtattttcgtgatcctgaccaagctgtgaacagccgaacggatggctaaacaaatgcaccccgtcaatgccttccgcctcgttggtttccttcagaaaacgctgttggatctgacgcgcgataccgttaacgcagccaacggttggaatgatccacaattcgttacgaatgcccacgtcgccatttttgcgacgatagatccgaacttctcgatcggccatttgcaccggcagatcgctaaattctggctgatattggtattcatccaagtcacttaaattggttttagcgttttgagaatgaatatgttcaccggtttgaatcgggctaagtgcatgacctatcggcaaaccatatttcacaatcatttgatccggctggattaaagttagcgcaaacttatgcccgcgggtcactggctgcgccagcgtgattgcatcgccatcaattttgatgacttctccctgcgccagatcctgtagagcaacggctacattatccagtgggtgaatttttatcgtcttttgcatagaaaacctttagctgtaagccgcaaccgctgctctcattccacgatccaggatagtttgcagttgctctgtcacctgttcggccaactggggtactgcagttaaatcctgcccccaatgattcgcatcagacaaaacggtctgaaccaatgcggcgggagtcgtttcgtattgcttcacactgctccataagcgagagtaggtttccagccagtgagcgtcgtcttgcaacggataggattctccttgacgttccccgcgataaaaggcgagcaacgcggctaatgcaaaggttaaacgcggcggcagcttgcccttttgctgctggtaagccagcagctgaggcaaaatgcgggtacggaatttggtcataccgttcaacgcaatagacaataactggtgctgaatgaaagggttacggaaacggcttaataccgcctgcgagaaggaaagcagttcatcctcaggtaaatccaaaaccggaacgatttcttcaatcatggttttttccacgaactgactgatttcagaatcattcatggtttgcccaacggtatccagaccggccagataagcgataggcaccagcgctgtgtgagcaccgttcaaaatggcgactttacgctctttatacggcttgatgtcatccacgatgcacacattcagatccagttgatccagacgcaactcttttgccaaccactgtggcccttgaataacaaagagatagaagtattccgccgtatcgaggaagctgtcctgatagcccaattcagcctgtaaagcggtcacttcatcgcggggataaccggtcacaatccgatccaccaacgttgagcaaaaagtattattttctgttagccaacgggtaaatccagacggtaactgccaatgctccgcatagcgcagcaccagttcccgcaaggcttcgccgttataatcgattaattcacagggcaacaacacccagcctttatctgccgcgccgtcaaaatgcgtatagcgctcaaataataagcgagtcagcttagctggaaatgacgccggtggcgcatcatccggtttatcttgctcattccaggcgataccggcttcggtcgtattggaaaaaacaaagcgaatattagcatcgcgagccagtgccagatactcgtcgaattgacgatagatattgatctcccgattcaccgaacggatcagccgagattcccgcaccgcttccccctgctcattcagaccgcgaatgaccgtggtatacaggccatcctgcgtactcaaggacggaggaaaatccgtatctattggccggatcactacgatcccagcgttaagatcggtatgttcgttcaaaaggtccagttgccaatcgacaaaggcgcgcaggaaattgccttcgccaaattgaataactttgtcagggtaactgcggccgggaaaatcacgacggttcagggttagcatgttgatctacctcataacgcgttccgccatagacaggccacgggcgataaaccggcatcatatgcacagcccgtcgctttccgtcccgcagacagcgttgaattaagcaaaagtttgaaaggcgggaggccgattggcgctcccgcttggcacattacaattcgatagtgaaatactgtttggcgttatcgaaacagatgtttttcaccatcgcacccagcagttcaatgtctgccggtgcttcaccacctgccacccagcggccaatcatctgacacagtattcggcggaaatattcatgacgtgtataagagaggaagctgcggctatcggtcagcataccgacaaagcggcttagcaaacccagctgcgccagttgggtcatttggcgctgcataccgtctttttgatcgttgaaccaccagccggaaccgaactgcattttccctgcggcaccttcgccctggaaattgccgaccatagtgccaatgacttcgttatcgcgtggattcaggcagtacaggatcgttttcggtagcgcattacgcagaccttgcgcatccagcaaacgggaaagcggctgagccagcggctggtcattaatcgagtcaaaaccgatatctgggccaaccagattgaacatgcgactgttgttattacgcagcgcaccgatgtgatattgctgaacccattcacgacgatgatattcaccagataaaaatagcaacacagcggttttaaactgagccacttcttccagcgttggctgagttcccgtcagacgacgagctagaataccgtcgagcgtcgtttcgtctgcttcaccatagaccaccacgtccaacgcatggtcagagactttacagccgtgagcggcaaagtgatccatacgtttgttcaatgcgtcgcacaggtcggagaatttacttatagacgtatctgccgcagcttccagcagcttcaggtaatcgcgaaaaccggcggcttcaatattgaaggctttatccggacgccaacttggcaacactttgatgttaaagctgccatccgcggcgatagctttgtggtggcgcagatcgtcaataggatcatcggtggtgccgaccattttgacattcatctgttgcatgataccgcgcgcagagaaagccggttgagccaacagctcattgccacgttgccagatttcttccgatgttttcggcgaaagcagtttgccggtaataccgaaaggacgacgtaattccagatgagtccagtgatacagaggattgccaattgtgtgagggacggttgcggcccaagcttcgaatttttcccgatcgctggcatcgccagtacagaatcgttcggcaacgccgttggtacgcatagcgcgccatttatagtgatcgcccttcagccagatgtcatacaggttcttaaaacgatagtcttctgcgatttgttccggtggtaaatggcagtgatagtcataaatcggctgatcttttgcataatcgtgatacagacgacgggcaaactcggtatccagcaaaaaatcttcggttaaaaactgcgacatattggcttcctcacatggctacatcgtagagcactgttttctgttatcgcgaagttatcacaccaattccacttaccgtccagcactttttacaagacagtgatcgcaaaaacctaacaaaatgaacaaatactcaacattttctattatttagtcccttgcagcactaaggctgacgagttctattattccctaattgaaaagtggtttttgtgatgtcactcaacttttaaatctgtatgacaagttattgttgcgtcgccctgagttgtcttatggatacgcatcatgagagttcaggggaaaccaaatcgaaaaaattacaggtcgtcggtgaagggatacatcgtcagtgtcatttttctaacggcttaggaccgtggtgataccaggcatcgcaaccttaggggcatcagcttgatttaaccccctcggcgttgagagacacgatcaaaaaaggagcgtttaggtaccaccgggtgcacgggcatcgactggatggaccaaattgcgccatggactgccgccagacagcactccatagcagtaatcttagagactgggagagatttagaaatgcgtaaaattaaagggttacgctggtacatgatagccttggtcaccatgggcacgattttgggttatctgacacgtaacgccatcgccgtcgccgcacctacgcttcaagaacagctacatatcactacgcaacagtattcttatattatcgccgcttattccgccgcttacactttgatgcagccggttgcaggttacgtactggacgtcatgggaaccaaaatcggctacgccatgttcgccgttatgtgggcgatattctgtatgggtaccgcgttagccagcagttggggcggcctggccattgcccgtggtgccgtgggtgcagctgaagcagccatgatccccgcaggcttgaaagccagtagcgaatggttcccggcgaaagagcgttctattgccgttggttattttaacgtcggttcatccattggcggaatgattgctccaccgttagtggtctgggctatagtcatgcacagctggcaaatggctttcatcattaccggtgtgctcagcctgatttgggctatctgttggttaattttctataaacacccgaaagatcagaaacgactgacggatgaagaacgggactatattctcagcggtcaggaagctcaccactccacctccaactcgaaaaagatgtctgcaatgcagattatccgtaaccgccaattctggggtatagccatcccacgctttctggcagaaccggcttgggggacgttcaatgcctggattccactattcatgttcaaagcctatggctttaacctgaaagaaattgcgatgtttgcctggatgccaatgctgtttgctgaccttggctgtattctcggtggctatctgcctccgttgttccaaaaatacctgaaagtgaatctgattgtttctcgtaaattggttgtgactatgggcggtctgctaatgattgcgcctggcactatcggcctgttcactagtccttatgtcgctattgctctgctgtgtatcggtggttttgctcaccagtctctatctggcgcgctgattaccctgtcttccgatgtcttcggtcgtaacgaagtcgccactgccaacgggttaaccggcatggcagcctggactgccagtacgctgtttgctctggtggttggcgcattagcagatacgttgggcttcagcccactatttgccgcgctggcggtgttcgacgtactggcagtcatcgttatctggacggtgctgcaaaatcgccctgccgatgactcacagacagatccgatacaacaagcaccggctgagcaaaattaacccgtccggcgacgttctccaagagtgacgcactgcgcacacactagcccggcagaagcttgccgggtttgtttttctccgccctacactacctttggttaagtatatctgtgatagcaatagctagaaccaatcgggaataagtggtataacaagtccgcgagatatgccgttcgggatagcctccaagccctgacaacactgagtcataacattatctgcctcaattgatccaagagccttaatcatggaattcacagataccagacggttataccaacagttggccgcagagttaaaacgacgcatcgaagctggtgtgtatcaggttggcgataagttgcctgctgagcgctatatttcggaagaaatgaatgtcagcagaaccgtcgtccgtgaagcgattattatgctggaagtcgagggctacgtagaagtacgcaaaggctctggcatccacgtcatgtccaatcagcagaagcatttggtcatgccaagcaatgaaattgagttcgctgctgccggtccttttgagctacttcaggcgcgccagttaattgaaagcaatatcgccgagtttgcagcaacgcaaatcactcgtcaggatatagtcaaactgattgaaatacaggaacacgctcgtcaggaagatcgttttcgggattcacaatgggatttgaaattccatgtgcaggtcgctctggctacccaaaataccgcgatggccactatcgtcgagaaaatgtggagccaacgggtgcataatccgtattggatcaaactgcatgagcacattgacgataaatccattgagagctggtgcgaagatcacgatcagatcctgaaagcgttaatgcgtaaagatccttatgccagcaaactggcaatgtggcagcatctggaaaacaccaagcaaatgctgttccatgccaccactgatgatttcgaatttaacgtcgatcgttatttatttgcagaaaatccagtggttcatctggataatcttgcggccaacaatatgacgataaacagcaaagcctgagctgaatagtctccccgctactattacctacgtttttccgcaggaagaatcgaaaaataaaagggataccgcctgcaaaaattgcggtttccctcttataaccttgcattggcgggatcactctagtcagtaaatgtcgagatctgtcagcaaatgtaagcagagaagctatttcttaaaagcggtacaataaaccatcaattaacgcctatatttccctgtttcatatcctgctattttgctaaagtgactgctcttttttttcccgccactttgggagcgaaacgcgaaagatgcgctggttgttgatcctgcttattgctgtttcttgctggaccggttcggtcgccagcaagccgctattggctgggcattctgattccacgcaggacgtttcttataccgcccttcagcgcgccgcaattcaatacattaatgttgaattcattactcaaaacgtcttccgacataatgcgccattgcccgaccagctgcgtcttggcaagcggatcaaaaatttctcaattaaaaaccgtctgagcacatctaaattcaccggaacaggcaatactttatgggtaaacctgagttggcatccgtcctggttcctaacttcacgcaatgctcaggcaaaagaaatctataagcagtcccgacaaccgtcaccattacgccaatctggccgctggatgcttcattcagctgcgcagcaaaatcgcgtgggcggctggaaagagagtaatatcctgtacagcggtgcactgacttatcacgacgccgcaattctgtttccattgtcataaaaatttataagcaaaaaatagatttactgcatacgcatcaacggattggttcactttggaagtatcagcacctttatctgaaccgccgcgtgagcgcaacaaaaacaatgacgttttaggaataccagatggatatcattaaagaactcttacatgccttgtggcagcaggactacgaaacactcgctaacccttcgttggtgtgggccatttatatcctgctgtttgtcatactatttctggaaaatggcctgctgccagcagcatttttacccggcgatagcctgctgattctggtcggcgtactgattgccaaaggggcaatgagtttcccggtcacgctagtggttctgactaccgccgccagtttaggctgttgggtcagctacatacagggaagatggctgggaaataccaagatagtgcagggttggttatcccatttacctgctcactatcacacccgcgcgcataatttattccaccgccacggtttgtccgccctgctaattggccgttttttagctttcgtccggacactgttacccacaattgctggcctttctggcctgagcaacgctcgtttccagttctttaactgggtcagcggcctgctttgggtactgattctgactacattggggttcgcgttgggtaaaacgccggtattccgcaaatacgaagatgaagtcatgttcttcctaatgctgctaccgctagcgttattgtttatcggcctatttggttctctgtacgtactgtggcgtaaaaagcgcagcgtgcagggtgataaaggaaatcaggcgtgatccagcttctggctcgtttgcgccgcccacgctggcactatgcggtgctagcgttaggtatgctggtgcttgtcgcgctgtttacccccgtgatactgcatactgaaagcgccctgaaaatcagccctaatcaacaagggctgagtcttccggacggcttctacctttatcaacatctggacgaacgaggcattcggattaaaagcattacgccggaggccgatagtttggtggtaagtctggaatcaccggagcagcagaaagaagccattgaagcattgcaggctattttgccgaagggctacgtcatcgtgctgagtgaatcaaccaaacgtcatagctggctgccaaagtttggcggtgatacgcaaaaaataggctagctcaatcctctgtcgggggaaactctcccccgtccctctgatgtcatttctccccgcgtgctctgattactcttcgatatgtaaccgataggtttcgcgctgccgctaaccacgcaacaatttgaaaaatgaaagggattccccaatataacccaatagaaaacttgggcgatgttctattcagcgctatgcttaacttaagtgcggttatcgccattactgatatgtcccatttattaagcggcatggaactaagacacaccgttgtcttcaggctgcaaaaaggaagaaatattatgttgttacgccattcccttctgctggttttaccggttgttgcattctgcggcctggctcaggctgctaccgctaacggctgcgatatcaaagcgaaagaaattcagcagcagatcgattatgccaaacagcatggtaatacccagcgcgttgccgggctggaaacggctctgaaagaagtgaaatccaactgtactgaagccggtttacaggctgagcatcagcaaaaagttgctcagaaacagcagaaagttgccgagcgtcagcaagagctgaagcaggcgcaggaaaccggtgacgcaaagaaaatcgccaaaaagcagaagaagctggacgaagcccaaaccgagctaaagcaacttcaggctgaatagatattattcatcgcttttggtagtcaaaaatctggttaaaaagccattttatggtgttttttaggacgaatccgcaggcggattagcatgattttccacaggttggcctttcaaccgctcagaaaatccgctatgttagatattcttctcagttatgttaaggagttatttatatggcacaagataaaaacgctgaaaatttgcgcgccgaactcaaatcactggcagatacattggaagaagttttgcattcctcctctgataagccaaaagctgagttagataaattacgatccaaagctgagagtgccctaaaggacactcgtgagcgcctgagcgaaaccggcgacaaaattgcggctcagaccaaagaaatcgccgacaaggctgataactacgttcatgacaacccttggacaggtgttggtatcggtgccgcagttggcgtggtattgggcgttctgttgtctcgtcgctaattatggcagagcaacctcgcacacagggccccggtaaaggggtccttgataccatccatcgcatcgccactatcgtggttggcatggttgaaacccgcgttcgactggcggtaattgagctggaagaggaaaaggcaacgctgattcagttgctgataatggccggaatcactctgctattaaccgcttttggtttaatgagcctgctggtgttaatgatgtgggccgttgatcccgtctaccgctttatggctttggctatcaccaccggcgtgctgttggggctagcgttgataggtgttatctggacgctggttaaagctcgtcgttccacgtttttgggttctacccgtcaacaattggaaatcgatcgggaattattggagaaagaccagtgagccgccagttacggttagagaaggaaaagttgctgcgtcagattgaacagcaacgcctggatctggctaacagcgcggcacactggattgaagtgaccgcgccttatgatcgcggctggctcaaaattcttgaaatgcgtaagtttctggttctgggttccagtctgatcgcagtttatggcgttcgccatcccagccgaatgattcgctggtcccgcagggcgttaagcgcgtggggtaccttccgacttttccgtcgcacattttcttcccgctaaactcgcctgtcgccactgtctcagacggcgagttttattaactcattcaatttattatttattttttattctcaacccttccacttatctttatcggctaacctttttcgcactttttgttaaacccatcaatttttttgataaaaacaaacagtattacttgctaacaactttcctacctccctactaacatattattcatcaacccggtatgaagctggaaagccaacggattgccacgaaatattgccgctaatgttaagcattagcatcaacccttatttggagtaagtagtcgatgaataaattacaagataccggtctgttggttgcacgtattctgatgccaattctgtttattgttgccggttacggaaaaatgggcgatgcctatgctggaactcagcaatatatgcagatgatgggcgttcccggcttcttcttgccattgactatcttgctggaatttggcggcggtctagcgattctgtttggtttcctgacccgtactaccgctctgtttaccgcgggcttcacgttgttaaccgcgctgattttccacacaaactttgcggaaggcgtaaaccagctgatgttcatgaaaaacctgaccatcgccggtggcttcctggtgctggccgttgcaggtcctggcgcattcagtattgaccgtctgctgggcaaaaagtggtaactttcccccgcggctaatatccgacgccctatctgatggtagggcgttgttattttgtcgccttactgacgaatggattaatacggcgttgctaatccaaacttatttcgccttcctctgctctctgcgctataaaattcgtgattacctctaaatacacaggagtacccaatgggacaactagttgacggcgtttggcaagacatctggtacgacactaagtcaaccggcggccatttcaaacgtagcacctcacaattccgtcattggataacccctgatggccagcccggccctcacggccgcggcggctttaatgcggaaaaagatcgttatcatttatacgtttcccttgcctgcccttgggcgcatcgcgctttattaatgcgcagccttaaagggttagaatcccttattccggtttcagtcgtacatccattaatgttggataaaggttggacctttagcaccgacgtccctgataccaccggagattccctttaccaatcggattacctctaccagttgtatttacgtgcagaacccacttatagcggacgagtgaccgtccccatactttgggataagcagcagcaaaccatcgttagcaacgaatccgccgatatcatgcgtatttttaatagtgcatttgatggtgtaggtgccgccaagggggattattatcccgaagcgctgcgtgaggaaatcgaagaaattaacggttgggtctacgatgcggtaaataatggtgtatacaaagccggttttgccaccagccagaacgcctacgatgaagcggtaaatacgttgtttgtggcgttggataaattggaattaattctggaccagcagcgttatttaactggcaatcaactgactgaagctgatttacgtttgtggaccactttagttcgttttgatcctgtctatgtcacccactttaaatgtgataaacgccgaattagtgattatccgaacttattcggtttcctacgagatatttaccagatgccaggcattgctggcaccgttagcttgccacatattcgcaatcattattatcgtagtcatgccacgattaatccctacggtattatttccgtcgggccagaacaggatttattgtcggcccacgggcgagatgttcgttttggttcagagtaatagtctaacccaataccctgttataccttttttactcggacgggcgaccagcgcccgtctcactatattcctaaccgcgccccagtaatttaggaatttcccgcaggcaccaggacttagcctcgcccatactgtctcgccgccaggccataataatatccacttctcggctgtactccggcccaacaacccgtaagcgacccgcttcgatatctttttcgaccatttcataaggcatggtcgccacgcctaatccggccagcaacgcgcgtcgtttatcttcaatagtactgaccgttaaacgctgctgtttatccaataactgaacggtaatgaccgggcgctcgcgagcggtatctgccacggcaatacctcgatatttaacccgagtcacttccgagagcggctccggttcctgatggattggatgatctgggctggccacgtagacgctggttactttatataattttcgtgaattgatttctgaagaagcgcggaaatgcatatctggtgcgataacaatatcagcacgcccctgctccaatcgctcccaggctccggccagaacctcagtcaaaattgaaacctgcgtattggccttgagcgacagtttgtcgataagcgggaacagtttccaggcgggcgacaacgcctcactcacaattgtgatgtgtgtttcccaaccccgcgccagcgcttcagcatcggtagtcagtttatcggcagcttccaataacacccggccgcgatccagtagcatccgaccaacatttgtgaatttagtgcgatgcccggagcggtcaaatagcaccacatccagctcttcttcaagcttctgcatggtgtagctgagggccgaaggcactcgacccagttcatcagcggcagcggcaaagctgcctcgacgatcaatcgcatccattacccgcagcgcttctagcgttaacgcccgatctttggccatcagttttctcagtcaggaaatttgaatataccgaccagattaactggctaacaatcctgcgtccagacgcttaccatttgtctatcaatttataggggcaatcatcgtcatgatcacatgcagaacggcaaaacagtgcgggcaagctgactttggttggttacaggcccgctataccttttctttcggtcattatttcgatcccaaactgctgggctacgcttcattgcgagtgctcaatcaggaagttctcgcacccggcgcagcgtttcagccacgaacttatcctcaggtagatattctcaacctgatcttacagggtgaagcggagtacagagacagtttgggtaatcatgtacagggaaaagaaggcgatgttattttattttcgccgcagtctgaggtgagttacagcgagcataatttgagtggctgtaagccattaacccggattcagctgtggctgaatgcctgccctgagcaggatactgattcgagtcagcgtctagcgctaggcaatgaatcatatcgtttactggcttcgcctgatggcgatcaggggagtctgaagctgcgtcagcagatgtggattcaccatttggatatggcggcgggagatgaacatagcattcagcttcacggtcaacgggcgtatttacagtcaattcacggcaccgtagaagtggaaggttcgcagaccagcgatcttcagcgtctgacctgcggcgacggcgcctttgttcaggaagagcagcagctcaccattaaagccaaaacgccgctacgcgcgctgttaatcgacctgccggtataggtactgattcaaataacagctgaatcctcaaagatcgcatcacgctggattttaggacgtcgcgagctagccgagttggggtgcgcccagcacgtaggaaccggaacctacacaaagtaggtgaggattctgagcactgcgtcagcccaaaatggcgacgcgcagtagcctgtcaccttacaggctcgagcttagcgcaccgaggggcgctccggcggctcacgccgctacgaccccagcggcacgctttcactcgcatccgtattagtgttgctgacttatcacgtcaagaaccgaagaaattacactccattgaattttagggcgacgcgcagtagtcaatcacccaataaaaaaccccttgtgaggataacctcacaaggggctctataatagagggagttgaccggtaagccgggttctgtcgtggacagtcattcctctaggccagcaatcgctcactggctcaagcagcctacccgggttcagtacgggccgtaccatgtgaacccctatttggccttgctccgggtggagtttaccatgccacggactgttgccagccgcgcggtgcgctcttaccgcaccctttcacccttacctgatcccacttgcgcgggccatcggcggtttgctctctgttgcacttgtcgtaggcttgcgccccccaggcgttacctggcaccctgccctatggagcccggactttcctcccctccacctgtctcccccgagagggacggcagtgaagcggcgactgtctagtcaactccgcggcggattatagtcacattgaagcggaatgtcatctttcacttgaaacaaagatttatagtgattaattatcaaacaaagtgattttatcgaacgtggcttaactctgttttgcatatgcgataataaatgaagccgttacccgcgcaattgggtcaatgtatggcgcgatatgttctcttcctccgataccgcgtgaatgacctattttcactttattacagctcaacaaactcatagataattgtaaagatgctgacaaaaattaccttttcgatcaaaacaatacgcagaatttattagctagaattagaactgtcaggccaacatttcactcgagcgttctaggagctgtactatgaaaagtatcgcgctgttcattgctccacttgccgcaatttttttgctcagtagctgtgtggtggaacccgctcgctatcgcgaatctgaatttgtggtaccgccgggcatagtttatgtcgctcctgaatatccaatgccagggccgggctatgtttggcgctatcatgaaggccattcgtggggctggtatcaccctgggcatggctggcatcacggttggaaataatgggtaaagagcctgataaaagccggacatcgcgcccggctttgcacattactgcgctgcgtcttcttctgtctcttccgcatcgctctgctggttgagcgcatagcgatataaggcatttttcttcacgccgtggatttctgccgccagcgccgcagctttctttagtggaagctctttttgcagtaatgccagagtgcgcagtacctcagccggcaatgcatcgtcagccagcgctttgtgtccttcgacaatcagcaccatttcaccccggcggcgcatgtcatcttcctgcacccaagccagcaattcgcccactggcgcaccgtggattgactcccaggttttggtcaactctcgcgccaaaaccacgtagcgttgtgggccgagcaccgtcaccatgtcctgcaaactttccaagagacgatgggtcgattcatagaaaataagcgttcgtggttcctcaatcagcgcctgcaaggtatccttacggcctttggtttttgctggcaaaaagccttcgtagcaaaaacgatctgaagcaatccccgcagctgacaacgcagctatagcagcgcaagctccgggcaaaggtacgacccgaatacccgcttcacgacagcggcgcaccaaatggtagccgggatcgttgattaatggtgttcccgcatcggaaaccagagctatactttggccttcctgtagcttcgccagcagttggtcagctttttgttgttcgttatggtcatgaagcgcaaacaggcgcgcgttgatagcaaagtgttgcaacagcaaacccgtgtggcgcgtatcttctgccgcaatcaaatcaacgcttttcagtacctctaacgcccggtgggtgatgtcccctaagttaccgatgggggtgggtaccacgtaaagcgtagatgcagaaatcactgctcgatcgtgttgattcattgtttcatccggattaccgatttaatattgagcatcttgaaaaaaacatcactggatacagtatgctttcctcaacatccgttcgtaccaaagcaggaattttcattcctgctgttctggccgctcttgtcttggctggctgttctggcctggccccacagactccgccgccgtcaaatatacaggacgaagcaagcgcgaactctgattattacctgcaacaattgcagcaaagtagtgatgataacaaggctgactggcaattactcgccattcgtgccctgctacgtgaagggaagctgccgcaagccagtgagcaactgaatacattgcctgaaaaaatgagcgacactcagcgtcaggaacaacagttgctggccgccgagttattggttgcacagaaaaatgcacctgccgccgctgcaatactggctaaattagacgccagcacattatcggcaaatcagcaggttcgctattatcaggcgctgatcggcgccagtcagggtaaaccgactctgccgctgattcgcgcctatatcgctcaggaaccactgcttaaagataaggctcatcaggataacatcgatgccacttggctggcgctggcgcaactgacgcctcaggatttgaatacgctggtgatcaatgccaatgaaaatgtcctgcaaggctggctggatctgttgcacgtatatcaggataaccgacagaaccctgatttattgaaagcggcgatcaaagactggcaaactcgctatccgcaaaatccggcggcgaaatcattgcctgcgcagctaactcagattgtgaacttcactcaggcgtccaccgctaaaattgcgctgctgctgccattaagcggtcaggcaaaagtatttggcgaagctattcagcaaggttttatggcggctcaaagcggcctgccagcacctgcaccaaccgcagaaccgaccattgacgcaagcgcgccagtggacggtgaggccgccgcaacgccggaagccccggctccagttgccgcacctgtcgctgccagcaatgcacaggttaaagtctatgacaccacttctcagccaatcgctgcgctgctagctcaggcacagcaagatggtgccacgctggttgtcggcccgttgctgaaaccagacgttgagcaattaaccgccacgccgaccacgctgaatattctggcgctaaatcagccagaaaccgccaaagacagcccaaatatctgttacttcgctctgtcgccggaagatgaagcgcgcgatgccgcccatcatttatggcaacagcaaaagcaaatgccgctgttgctaacccctcgcggtgcttttggcgatcgtatcgccaaagcctttgctgaagaatggcagaagcaaggcggccagaccgtactacagcagagctttggttccaccgcagagttgaagcagtccatcaacagcggcgcgggtattcgtctgaccggccaaccaatttctgttacaccgacagcggctccgcaatcagtgactatcgccggtttgactatcccggcaccgccggttgacgcgccggtggtttctacttccgcaggcgggaacgtggatgccgtgtatatcgtggcaacgccggacgagctgacgctgattaaacctatgatcgatatggcgaccaccactcgcagcaaaccatcgctgtacgccagctcgcgcagttatcaggctggtgcaggcccggattaccgtctggaaatggaaggcgttcagttcagcgatattccgctgatggccggcgccaaccctgcgttgatgcagcaggcttcctccaagtttgctaacgactattcgctggttcgtttgtatgccatggggatggatgcttggacattgtctaaccactttgctgaaatgcgccagattccaggctttaaggtatcaggctctaccggtgaactgaccgcatcatcaaactgcgtggttaaccgtaaactgccttggttgctataccgccagggaatggttgttccggcgcaataaccggcgttttcaacctgactttagcgcccccgtttccggtcgggggcgaaaataatggattaaaacatgagccaaagggatattggcgcaaattatgaacggctggctcgccgccatctggaacaagccggtctggtctttcattctgccaatgtgagcgttcgcggcggcgagatagatcttattatgcgcgacggtgcgacttgggtatttgtcgaggtgcgttttcgtcggaatgcgacctttggcggtgccgctgccagcgtgactcataccaaacagcaaaggttattacgtgctgcagcggtttggctggcgcagcgcggagccagttttgacacatcatcttgccgttttgatgtttttgcgattaccggtaaccagttagaatggttgcctaatgctttcaatacggattgatcatttttctccggccaaagccgggcaattcattttactgagtgggttaaatcaacgtgctggatagaatcaaagtctgttttaccgagagtattcaaacccagattgctgcggcggaagccttacctgacgcgatatcacgagcggcgatgatgctggttcaatcactactgaatggtaacaagattctttgctgcggcaatggaacctcggcggcaaacgcccagcatttcgccgccagtatgatcaaccgattcgaaaccgaacggccaagcctgccagctatcgcactaaatgccgataatgtggtgttgaccgcgattgccaatgaccgtttgcatgaagaggtttacgccaagcaagtgcgtgctttaggccaggccggagacgttctgctggcaatttccactcgtggtaacagccgtgatattgtgaaagcagttgaagcagccgtaacccgcgatatgacgattgtcgcgcttacgggttacgacggtggtgaactggcaggtctgttaggccagcaggatgttgaaattcgcattccttctcaccgcagcgctcgggtgcaggaaatgcacatgcttacagtgaattgtttgtgtgatctgattgataacaccctattccctcatcaggacgattaaaggagcataaatgaaggttagtttcccattttttgccgtgctgtttagcgcattgctattacaaggctgtgttggtgccgtcgtagttggcagcgccgccgtggcgaccaaatccgcaactgaccctcgcagcgtcggtactcaagttgacgacggcacactagaagcccgagtgaccaacgcattgagcaaagaccagcaactgaaaaaagaagcccgcgtcgtcgctacggcttaccaaggcaaagtactgctaaccgggcaagcaccgacgaccgaactggcaacccgagccaagcaaatagccgctggcgttgaaggcaccagtgaagtgtacaacgagattcgtctgggcaaaccggtcgatctgggcaccgcttcatcagatacctggattaccactaaggttcgttcgcaaatactcaccagtgattcggttaaatcttctaacgtcaaagtcaccaccgaaaatggcgaagtgttcctactcggcctggttacgcagcaagaaggacaatctgccgcgcagatcgccagtaaagttggcggcgtaaaacacgtcaccaccgcctttacctacgttcagtaatttactcacttaaaagcaaaagggcttagttgatactaagccctttttgtttctgccaactcaacctagcggccgttttacagcgcattttcctgtaggaaagttttgccgcccagctgacgcatttggcgtaagatccactgttggcggctaattacatagcctgagggtgcatttgccttaaagcgatgtggattcggcaacactgccgccagcatagccgcttcagaagcgcttaaccggctagcaggcttatggaagaaacgctgcgccgcggcctcaacgccgaaaataccgtcgccaaactccacaatattcagataaaccgtcaaagtgcgccttttggtccacaccagctcaatcccggccgtcaatccagcttccaaccctttacgcacccaactgcggccatcccacagaaacaggtttttcgccgtttgctgcgataacgtcgatgcgcctcggatgcgtttttgattgcgctgattgtgcgccagagccgattcaatggcccccatgtcaaatccccaatggtcagggaatttctgatcttccgccgccatcacggccaaagccatgtaaggggaaatttcgctcataggcacccagtccgaatgcgccacgtaagaaaaatcgccggaaaaccaagctccgagctgcctttcgaccatcaccatggagaagggcacgggcaggaaggcaaaaatcaaaatagcggccagccaaaagcccaacagcgccaaaatgccacgctttagaccacgccagatccatcctatcccgtatttccccaatttcattcgattaagcccagcaccttactcaccagtttgttgataccgacggctgcttctgagatagaaccggccagcatataggcgggcgtggtaacgactttatgctccgcatccaccacgacatcttccaccgggcaaacgatatgttctccccccatggcctcaatagcatcggcggtatcgatatcattaccaatagtcaggcgaattcgctctcccaacagctttggtaacaaagctggggcaatacacataaatccaattggtttgccagacttatgcattgtttgagtaagcttatataaatcttcgtctacagaacacgccgttccttcggttgcgaagcgactcagattcttcgccgcaccgaatccgccgggtacaattaacgcgtctaactgcgccggatcggcggcagaaagtggctgaatcttacctctcgcaatacgcgcagactcgactaacacgttacgattttcgtcggtaatttcaccagataaatgattaataacatggagttgcgtcttgtccggcgcaaagcatactgcctcggctccggcgcgatccaaagccagcaatgttaagacggactcatgtatctctgcgccatcgaaaacaccgcaaccactcaacactacaccgactcttttcatcacaatcctccttttgtttcgctgtcaatcgctaacctgttctagtgacaaacaacaatctctatcacatattttaatgaatcttgtaacaagagcgcttacatttgctatgttgttgcttgtatgatgtatcaacgaatccataaaacctgcggacacacacagaaatcaatacgcaggttcacgttttccctggtgttggcgcagtattcgcgcaccccggcctcggtcggggttattttttttcagcttccgcagtccactcacgcagtacctgaacatcgttacgccattccagtttcagctcatcaatccaatcctgaacgttatcccaccatgctggcaatgaaggcgtttgaatctgctgtgccagttgctgcaaatgccgtaaacctaccgaacctgccgcccctttaattttatgcgcttcttcggcaatacctttttggtcacgagcggtcatattggaatccaacaccgccagataacccggcatcatctgctcgaacatttccaaactctgatgaatcagctgtggtcccaccaaatcgatgtattgctccaacatcacggtatcgagtaacgattcattagtttgcatcggtttatgttcctgtttttttgtggagtgggaaggctgatgatcccagagctgcttgatcattgccgttaaagccgggacagacagcggcttgctcagcacgtcatccattccagcatcaagatattcttttttatcttttagaacgttagccgtaagcgccaccagcggcggcaagtggcaatggccataatccgcgcgaattttgcgagcaatatccagccctgtcatatccgggagctgaatatccaataacactaaatcaaagtcatccggattaaacatatccaacgcatcctggccattcatcgccacctcaacgctgttacccaatttttccaacaccgagcgcgccacaatcacgttgagttcgatatcctccaccagcagcacgtgcagtgctggcagcggcatatcttcatcagacaacacgctagccgcctcatcctgcaccgcaggcgccttgatagacagcgtaaagcaggaaccgatgccctgagtgcttttcacggtgatatcgccgcccatgctctgcgccagccgtttggacaccgccagcccgattccggttccggtagccggacgcccgccgttgctgtctttcacctgataatacatagcgaagattttgtcttgttcatcctgcggaattcccatgccggaatcttccacttcgaagatcagtcggtcaggattttctcgtcggatacgcacaactatctgcccttcctgagtgaatttcaccgcattaccaatcagattccacaaaatctggcgtaggcgagtgccgtcggtgatgattttctctggtaatgaaccctgaggttccatcaggaatttcagacctttaggctgaaccagcaaaccggacaggttttccagatcggtcataaaaccggtaaagtcgatcggttggttgtccaactgcactttgcgccgttccaacttatccatttcgataatatcgttgaatatattgcccagagtgatggcactaacatgaatggttttgaggtatttcagctgttcatcgtttaaatcggtatccagcaagatacgacttaggccgacgatgccattaagcggcgtacgcagctcatggctgattgttgagatgaaagtggtcttatccctgctggcgttctccagcgcgtcttggtagcgcttacgctcggttatatcgcggccaaagcccatcagaccatgccgtttacccacgcgatcgtaaaacggtactttacgcagttcaaaacaggccttacgcccatcggggtacaccagccactgttcgtaggtcagagaaacgttgtggcggaagactttttcatcggtttccattactttttcggcaatatctggcgcgtaaacttcctgtggcgtcaagccgaccagctgtttctcacttttaccggtcagcaactccatcgcgcggttacagccggaaaattcattatcttcgttacggtagtagaccaaatcgggggatgcatcgaggaaggaacgtaatagggcggattgttgccctaattccacctgcgcctgctcacggtgccccatttcctctttcagtttatccacaacctgtagatgggctttctccgctttctcgcgttcgataatttccagatttagctgcgagatattttcctgcaattgctgattcagttcccgatcgcgataacgcatgatttccagcttatctaccagtctggatagtcgctgacgggattcctccagctgttccaccaccactgacaggaagtaaaccgcccacggcgtgattaacaggccgaaaaagatggagcgaacaaaatcgatgctttcgaccgagccgcgtaataccaaagtgacggccatttgcaccaccatcgccagtattaccagcaccgaagccagcagcagcgagaagcgcaccagccctaacttcaccattaaatcaacgtaatactgggctaataccctgatttgcttcataaccactcccgtcaaacttcatgcgataaatcataccgcaaaaccagaaatagataaggcgggttgccaagaagtgtggaaaagactgcaaatcaacgggaaattgcgaaagttgagaatggcgatagcccgcagacacgccaaaaataatgggcgatgcgctgtagccaagttggggtgtgcacagcacgcaagaagcggagcctgcacaaaccaggtgcggattttgatcactgcgtcagcccaaaatggcgacgccctaagcctatctcccaaggcttagggcgttcgagcgacagtcaaactgagtacgcctgcgcgcagtgccccggatttacacccagtagcacgcgaggaggtagcagtacgcgaggaggccgagcacaacccaagttcaggtgacaaacgccttgtagccgatcacctacaaagcggaggcttggcctccgtgggctaacatataccgattcaactccaccataccggtccagcgattttcgcaccacagcggagccaacagggttgggcgacgagcactggcggaaattcggtgatagacaatatcggcgggtgtatgacgaatcatttctccggcggtaaccacatagtcttccagagccagttccggcaaacgccctgctcgccaggctttagccatagtgctgccttccacgatatgaagcggatgcagttttagtccatccacgccggtatccacaacttgttgcagagtttgcaggcattgcgcttgattttcgccgggcaagccaacgatcaaatggcaacacactttcagaccgcgcgcgctggcacggcgagccgtttgttggtagctggcgaaatcatggcctcggttaatacgtttgagggttttatcattggcagtttgtagccccagctccagccagacttcgtaaccttgccgatgataaccactcagcaggtctaataccgcatccggtacgcagtctggccgggttcccacacaaacgccaacgatatccgcttcggctaaagcctgttggtacatggctgccaacgcattaacttcggcataagtgctggtataagcctgaaaataagccagatagcgattagctcggttaactttcttcgcctgcgcttccagttgctcgctaatggttcgtagctgcatttgttcgtcagcaaacgaagccacctggcaaaatgtgcaaccaccacgccccagagtaccgtccctattcgggcagctaaaaccgccgtggagcgtgagtttatggattttttcaccatagcggcgctgtaaatccgcaccaaacatattgactaattgctgcaactgcataatctggaggatgcctgtcgtaaaagtcgcttagcctaactggtcagggtgttccgtgcgatgacagagatcaactcccactccctcgggtgcaacttcgcataaccattcactataaatgcaaataaaatcatttagctaccgattaatttttctaatctcggcaaacaccttaccgcatctattacaaattgatgaaaaatagttttaaatgtcacaaaatcattaaatcacagaatatcactctgacatccccaccagcactagcatggtgcagagatttgacgattgcactatagtgagacagctcacacttctactgcccatcaacgactctttcaccgggtcaaaaatgcataaattatttttaatatcatatagataaatcattttttgtgatctggatatatcttaggcctatatttgacctcggtattctttctcgctaagttggaagtccgctggaagctttctagacgggcaaacgtctagtcataattatgcagttatttaagactccctcttaaaacaagtcatataccacttgtgagaccatcacgagaggtcattgacggagggcggaaaagcagatttgccgcgccaggcgcgcctgtcagcccacccgtcaccgtgaattgtccctcgcagtcggttgtgagagtcacgcagagcctggggaggttcactgatatgttgtacgataaatcccaagagaaggacaattgcggttttggtctcatcgcccacatagaaggcgaaccaagccacaaggtcgtgcgtactgcaatacacgcgctggcccgtatgcaacaccgtggtgctattctcgctgatggtaaaactggcgatggctgcggtttactcttacaaaaaccggatcgttttttccgcatggtcgccgaagagcgcggctggcgtttggcaaaaaattacgccgttggcatgatattccttagccaaaacgatgaactggctaacgcaagccgccgcatcgttgaagaagagctacaaaacgaaaccctttccgtggtgggctggcgcgaagtgccgaccaaccctgatgttcttggtgaaatcgccctttcctctctgccgcgtatcgaacagatttttgttaacgctccggccggatggcgcccgcgcgatatggagcgccgcctgtttgtcgcgcgtcgccgtatcgaaaaacgcatctcagatttagatttctacgtttgtagcttctccaatctggtgacgatctataaaggcctgtgtatgcctgcggatctgccacgtttttatctggatctggcagatttacgcctcgaatcggccatttgcctgttccatcagcgtttttccactaataccgtgccgcgctggccgctggctcagccgttccgctatctggcgcacaacggtgaaatcaatactattgccggtaaccgtcagtgggcgcgcgctcgtgcctataaatttaaaacaccgctgattcccgatttgcaggacgcagcgcctttcgtcaacgaaaccggttcagactccagctcgctggataatatgctggaattgttcctcagcggcgggatggatctgatccgcgctatgcgtttgctggtaccaccggcttggcagaataacccggatatggataccgacctgcgtgccttcttcgactttaactccatgcatatggagccgtgggatggcccagcgggtatcgtgatgtctgacgggcgctacgccgcctgtaacctcgaccgtaacggtctacgtccggcgcgctacgtgattaccaaagacaagctgattacctgcgcttccgaagtagggatctgggattaccagcccgatgaagtggtagagaaaggccgcgttggccccggcgaactgatggtgatcgacactcgcagcggcaagatcctgcattcagccgaaaccgataacgatctgaaaagccgccatccgtacaaagaatggatggaaaaaaacgttaagcgcctggtgccatttgaggacctgccggaagatcaggtcggaagccgcgagctggatgatactcagctcgaaacctatcaaaagcaattcggttataccaacgaagaactggatcaaatcatccgcgtattgggtgaaaacggtcaggaagcgacaggctcaatgggcgatgacaccccatttgccgtgctttccagcggcccgcgcattatttatgactatttccgccagcagtttgcgcaggttaccaacccgcctatcgatccgctgcgagaagctcacgtgatgtcactggcgaccagtatcggccgtgaaatgaacgtattctgcgaggccgaaggtcaggcgcaccgtttgagctttaaatccccgattttgctgtattcggatttccagcagctcactacgctggaaggcgagtattatcgcgccgatcggctggatctgacgtttgatccgagccagcaagatctgcaacagcgcgttttatcactgtgcgacgaagccgagcgtaaagttcgcgatggtgccgtaatgctggtgctctccgaccgctcgatttcccaaacccgtctaccggtgcccgcaccaatggccgtgggtgcgattcagactcgattagtagaaaaaaacctgcgctgcgatgccaacatcattgttgaaaccgccagcgcccgcgatccgcatcacttcgccgtattactcggctttggtgctaccgctatctatccttatttagcttatgaatcattggctaaattggtcgacacacaggctatagataaaaagtaccgcgatgtgatgctcaactatcgcaacggtatcaacaaaggcttgtataagatcatgtccaaaatgggcatctcgacgattgcgtcttatcgctgcgccaagttgtttgaagccgtaggcctgcacaaagagctgtctgaactgtgtttccagggtgtggttagccgtatcggaggcgctaacttcagcgatttccagcaagatctgcaaaatctctccaaacgagcctggctcaagcgtaagccgttggatcaaggcggtttactcaaatttgtccataatggcgaataccacgcgtataacccggatgtggtcaatacgttgcagaaagccgttcacagcggtgaatacagcgattacgaagcttactcaaaactggttaacgaacgtccagtggctacgctgcgcgatctcttggcaatcaagccgcaaggtacgccgatcccagtagatcaagtggaaccagcagaatctctctttacccgtttcgatacggcggcaatgtctatcggcgcgctcagtccggaagcccacgaatcattggctatcgctatgaatagtttgggtggattctccaactccggtgaaggtggcgaagatccggtgcgctatggcaccaacaaagtctcgcgaatcaaacaggtagcatctggtcgttttggtgtcactccggcctatctggttaacgccgatgttattcagatcaaagtagcccaaggggcaaaaccgggcgaaggcggccagttaccgggtgataaagttacgccctacatcgctaaactgcgctattccgtacccggtgtgacgctcatttcgccaccgccgcaccacgatatttactccatcgaagatttagcacagctgattttcgatttgaaacaggtcaatccgaaggcaatgatttcggtgaaactggtttccgagccgggagtcggcactatcgccaccggcgtggccaaagcctatgccgatttaattaccatcgccggttacgacggcggcactggtgccagcccgctttcatcagttaagtacgccggttgcccgtgggaactgggtctggtggaaacgcaacaggcactggttgctaacggtctgcgtcataaaatccgtttacaggtggacggcggcctgaagaccggcgttgatattgtcaaagccgcgattctgggtgcagaaagcttcggtttcggcacggggcctatggtggctttaggctgtaaatacctacgtatttgtcatctgaataactgcgccaccggtgtagcaactcaggacgaaaaactgcgtcgcgatcactaccacggcctgccggagcgcgtagtcaattacttccagtttatcgccagagaaactcgccagatcatggccgaactgggcgtaagccaactggttgatttgattggtcgtaccgatatgttgatcgagttggatggcatttccgccaagcagaacaagctggacttgtcatccttgctggccacagccaaaccgcatccaggcaaagcgctgtactgtaccgaaaacaatcccccgttcgataaaggctcactgaacaaagcgttgctggaacaggctgaaccgcatattgaagccaaacaaagcaaaactttctactttgatattcgcaacaccgatcgctcggttggtgccgcactgtcaggggcgatcgccgcgaagcatggagatcaagggctggcgaccgatccgatcaaagcgcatttctccggtaccgccgggcagagctttggcgtatggaatgccggcggcgttgaattaacgctaaccggtgatgccaacgactacgtcggcaaaggcatggccggcggtcgcattgcggttcgtcctccggtaggctcggctttccgtagccatgaagccagcattgtcggtaatacctgtctgtatggcgcaaccggcggtaagctcttcgccgcaggtcgcgctggtgaacgtttcgccgtgcgcaactccggcgctatcaccgtagttgaaggtatcggcgataacggctgtgaatatatgaccggcggcatcgtctgcgtgctcggtcgcaccggtatcaacttcggtgccggtatgaccggtggattcgcctatgtattggacgaagacggcgagttccgtaaacgcgttaaccctgagttggtagaagtattggatgtcgatgaactggctatccatgaggaacatctgcgcgggctaatcactgaacacgttcagttgaccgggtccagccgtggcgaggaaatcctggctaactggccggattgggttagtaaattcgccttggtgaaaccaaaatccagcgatgtgaaagcactgctgggccaccgtagccgttccgcagctgagctgcgggttcaagcgcagtaaggggttaaaatgagtcagaatgtttatcaatttatcgacttacagcgcgttgatccgccgaaaaaaccgctgaagatccgtaaaatagaatttgtagagatttacgaaccgttctcggaaacccaggcaaaagcacaggcagaccgctgcttatcctgcggtaatccttactgtgaatggaaatgtccggtacataactacatcccaaattggctgaaactggccaacgaaggacgcattatggaagccgcggatttggcacatcagaccaatagtctcccggaagtctgcgggcgggtttgtccgcaagatcgtctatgcgaaggttcctgtacgctaaacgacgagttcggtgcggtgaccatcggtaatatcgaacgttatatcagcgataaagccatagaaatgggctggaagccggatatgtcacacgtccatccaaccggtaagcgcgtggctatcatcggcgcaggtcctgccgggctagcctgtgctgatgtgttgacccgcaacggcgtacaagcggtagttttcgatcgtcatcctgaaatcggcggtctgctgacctttggtattccagccttcaagctggaaaaagaagtgatgatcaaacggcgcaagatcttctccgaaatgggcattgagtttcgactgaataccgaaatcggcaaagacgtggcgatggaaactctgcttaacgattacgatgcggtattcctcggcgtgggaacttatcagtcgatgcgcggcggattagaaaacgaaggggcagccggcgtctacgatgcgctgccgttcctgattgccaataccaagcaactcatgggttacgcggcaacctcggacgaaccttacgtgaatatggaaggtaaacgcgtggtggttctgggcggaggagataccgcaatggactgcgtgcgcacctcaatccgtcagggcgcaacgcacgttacctgcgcctatcgccgtgatgaagtgaacatgccgggttccaaacgagaagtaaaaaatgctcgtgaggaaggcgtcgaattcaaattcaatctgcaaccgctcagtattgaagtaaacgatgcgggtaaagtttgcggcgtgaaaatggttcgcacccaattgggtgcaccggatgcgcaaggccgccgtcaggctgaacatattgccggttctgagcacattttggatgccgatgcggtggtgactgccttcggtttccgtccacataatatggaatggttagccgctcacgctgtcaatctggataaacaggggcgtgtagtcgcgccagaaagcgccgataacgccttccagaccagcaacccaaaaatctttgccggcggcgatattgtccgaggctcagacttggtggtcaccgctattgccgaaggccgtaaagcagccgaagggattatggggtatctggaagtctgaatttgccagtaggtaggcagaaatacactaaaagggctgatattcagccctttgttatttcactctcatataaatggcgagccatcatttgtgggtaaccatatatcaaattgaagtcttcaatcagctcaccgaatcaggtaactaatccttgggaaaaatgattttaccctgatcgtctgaagggctgactttctcagagatatgtagaatttcggtccttttacccggaatcggtaataaactaagtgaaccattgaaaatacctgagaaataggccttaccaccaatcatacgctcaccgatattcactctatcttctgctaataactctatttcacgattatctgaaccttgaatacgctcaaatgtcatttcttttgccttaacaatcgcatgttctgcaaaattgagctcacctaatgttatgttttcttttgctgtcatcttaatatttgtagcattcaccgaggcatcactcctggttttggtaatactttttccagcactcataatgaccttctgtctagcacttaggccgttggtagagatatcgccagacatactagccagataaacattgcctccagaaatagaaccttctgtgactaaattatcgactggtgctaaatttattgttccgttggcctcaagagcagtggcatttaacttaccaaaagtcttcatggtaatatcttgctcagctctaatatctttaacaagcagtggatttctggaaccactacgatatttaaccgagttgatgccgctgtcagcgtttgctacaaaaccgctagatgcagaatttacaacaccttttaaggtatcggttttattgaaatggttctctaaataataatcacctcctttcgtcatttcattacctacagtgatagttttcgctataatttctgcccctgcgttactgctttgtactacgctaccctcgctatttaatacaacatcttttgcattgatcatgcttttaatattagttgaaatacccgaattaagatcaatagtcccattagggctattcaaacttcccgccaaatgctcaacactctcgccaatcaatttaattcgaccattattactttctacgacaccagcattaatcacatttctatttaccacggaataccgcgcatatggcgcttccggtattaatctaatatttgagaatgcgtgccttttatcttgattattccaagatgttgtatcaacttttaccgacatgccactatctccaactgatagtgtcatgtcatcgccagcagccaataacacttcatttcctgaatcaataacgccttcattaccaacagcagctcccatcatcacaacattatctttcgctgtgatttttcccaggttaacaaccaagccaccacgagcgtccccagaaaatgcgatatttccaccaggtgtagccataaaattatcattagtggaattcaagctagacagaaccaagctacctacatcaattttggcaccgtcggtaatggtaacgccgcgcggattaacgacgaaaacctgtccgttagacaataaattaccttgaatgtaagtttcaaattgttcgtgaacccgatttaaaacagcggaattagtattaggttgttcaaacttaacggtttcacctggtgctataccgaagttagtccaatcaattaccgctctgtcactattctgcgtaataatagtagtattctcagggcttttttcaccaataattgcattacccgcagtgacttccccaacgcctaatgcataaacttggccacttaatataaagctaatacaaacggctagaggtttggctattctattacttttcatgataactcctttatatgcagcaatatctatccctgattagagatagccccgcgaaataatcgcgtaagatgtttatataaaaataaatgtcaactcagatgataattaaaaataaataacacaaccaatttattcataaaaatatgatttaagtgaaaacatggttattatgaaattattattagaaattaatcgaaccggttaaccaccatcggccacgatcggtagcgccaagtaaattatctactgcgccagcccgtctggcataagtaatatcaatgtttcctcgatcgtgctgataagtcagccctgctccataaccttgtaataaaacatgattagattgaccgattcctttatttgccagtaaagagccttgggcgtaatcatagaaagcatgagtactgattccaggatataacgtagttagatccaggcgtaatgctggggatagggaaaaacctcggtctacgctaatcgtattcacatcataagcccggacaatcgatggaccacctagcgccattttttccacgccgtccatattctgatgactaaattgcccggaggcacgcagactagcgccaaaataatcgttgagtcgctgtaatcccataccctgggcttcccacttccaaaattccccacggttaggattatcttgctgcgcatcccttaactttccacgagttaatcctgcacgatagttaaaaatattaggttgtccaaaccatcggtgacgaaagtccccattgagactcaaacttatagagtcttgctcacggtgagaaatgaaggtcaatattttatccctcatccacttataatccccctgtacacccagagataaattattgcccgcagtacggataaccggccaagagctataaatcgagagcacatcagcattactgtcgataaaaccggtaaatcttccccccggctgcgactcaacccgactataagaaataccgccccgtgcgccttgataacctaagggtaaatcataggcaatattgcccaggatagttttggcatcattggaatctttattttgcaggaactgaggaacatagagcaccattccctgtaagcgatccgccgatcctgttgggttattaatggtcattcgagcaaaagtccggatgcggccggaataacgccccccatgattatccatcatcaaacgtccgctaatcactggctctgatgccacgctcacgctcagctgcgagctccctacctgttcacccggtgataatattgaagttaatggcccgattcctggctgatcccctaagcgcagcagcgcgctttccatttgactaatatcttcaggttgcttattccctgcctgtaggaatttatttatcaaactatcgcgcacgttagattgattgttgtgtagatgaattttctctaactgcccttgcaccacctgaatataaacatgaccttcagtaatatcttgttctggcaaataagcaaaactaagaaggtcgccacttttgcgcattatcctttctatttccaatggaatagcctgtagctgggataagctcatattctgattctgtcgcgcggctaatagcgtatttacttgttcccgatagcgctccggtaaagatttcacacctagcgttgccactcgcagcatttgccccgtgtcgcttttcgaattggatttttcgcgttggtcaatgactggtttctgctgcaccctcgttgtttcttgggacaatagttgttcattatcttgtaaaatagccgcgctacctgtaacgactcctgataaagacggggtatttgcccaacttttctgattcaaacctaataacacgaaataaaataaaaagtaatgaatagagtgagtaataaatctattattttcgcgcatgggagaatatccagtcatattataagttccttttaaatgcgcattatcactccttgcattccaattaatgacattgatagatattaatcatataaatatccatactagatcatcaaagttaacaatggatgctttgcgttttaatatttaaataaataatatcatttcaacgtagccacatcattaactcactacttaatgacaatttcaattaattaaccgcagcaagctttaattaagaatattctgcactaaaatatttactatataaatataagcaatgaaacacaatgtaatacatataaataaaatttgtatcatgaaattaaacatgggtttttgttatgtatttaaaaataattaccagcatgattcggatgggaaataaaaattaataatattatcaaatgaatagggtagaaaaataaaaaaattgtaacaatcaagtcaactatattcatcgcgatctatacataaatagctataatgactgacttatcttcgtgtaagcgcagatattggcacaggttagctattgaacaaataaattattttaatttgttatagttacaacccgttattttgatcaaggatatcgatgatgaaaacccctttgctattactcgccggtggtttactggtcaccagtttcagttctctggctatgtcactgaattatcaggaagtaggctacaacattgaagcacgaggagccaaagcggtagtagcagaactggctaaatccgggcaactgtcggcggtagaaaataatatcaagctgggtgatgataactggattgcgatggcgccgaagctagtagaaggtgggaatcagaaatttgcgcaaggcgttaaatcagcactgtcttcagccctgatttataatccagcggcggtcttgaaggccgtaggcgatagccattcgttaactttgtccgacgtctgtactgctccgactgatgcaacagatagcaccgccaaaatcaacttcaaacaacgggcttccagaactctatcgactatcagaaatagcgatatgatgaccacgcgggatagttgcatcgccgaattgcagaagctgtcttaacgatcggcttttgagccagaaacaacaagggcggcctaagccgccctataataatacgcagaacactcggattattatttcacaacccgtaatgcaggccgtccaccccgtggaggctgcggaggctcatcatccggtttgctgctgtccagctttgcctgagtctcatcggtgaccagcaccaggctttcgctcggcgcgttttcttcgttctggtcatccatctcggcaaaataaccttctgcgtcggcatcataagccgcttcaggttcaaacatcgtacccgcgccgttttctctggcataaatagccagaactgcgcccataggtacaacaacctgacgaggtacaccgccaaaacgggcattgaaacggacatcttcattacccagttccagattacccaccgcccgcggcgcgacattcaatacaatttgaccatcacgggcaaattccattggaacctctacgtcgggcagcgtcacatctaccactagatgcggtgtaagctcgttatcaatcagccaatcataaaatgcgcgcagcaggtaaggacggcgcggagacatatctgacatctccataaccattaaccttgaatgcgcaaacgcatttcgcgctcaggttcagtcagcgaggccaggaatgcatcacgttcgaacacgcgagtcatgtagcctttcaattcttttgaaccagcgccgctcagctcaatacccagttcaggtaaacgccacagcagcggtgccaggtaacagtcaaccaagctaaattcttcgctcatgaaataaggcgtctgaccaaagattggagcaatggccaacagctcttcgcgcagctggcgacgggctgattctgcttcctgaccggttttttgctcgattttgtacatcagtgaataccagtttttctcgatacgcagcatcatcaaacggctttcaccacgggcaaccggatacacaggcattaatggaggatgcgggaagcgctcatcaaggtattccatgatgatacgggattcatacagagtcagctcgcgatcgaccagcgtaggtaccgtttggtacgggttgaggtcaatcaggtcctgcggcaggttatccatctcaacctgctcaatctcaacgctgacacctttctccgccagtacgatacgtacttgatggctaaaaatgtcggtcgggccagagaacagcgtcattaccgaacgtttgttggcagcgacagccatgaaaacctccaagtttatctagaaaacagtgcgaatagccaacacaacggttgctatcctgagtagttttaccgccagttcactgtctcgaccaatacgccgttaataagccttggtcgagataatcattcagccagggagataaacggacgtcagcagctcggcgaacaggcacaaaagtgtgtgatagtttaccagattttgcttgttttgtggggatggtgcagtgatttcatggtgatttgtctgacgactcgcagtttagaccgcataatcgcagcccccaatagggattactcgaattttaggcataaaaaaacccggtgaggcaccgggtttttagcattaatatgatgccgtaaaggcaaaaaattaacgtttggagaactgtggacgacgacgtgctttacgcagacccactttcttacgctcaacttcacgcgcatcacgcgttacgaagccagctttacgcagttcaccacgcagagactcgtcatactccatcagtgcacgggtgataccgtgacggatagcgccagcctgaccagaaataccaccacctttaacagtgatgtacaggtcaaacttaccaaccatatctaacagtaccagaggctgcataacgaccatgcggccagtctcgcgaccgaagtactgttcgatgctacgttggttaataacgatgttaccgctacccggcttaataaagacgcgtgcggaagaacttttgcggcgaccagtgccgtagtattgattttcagccattgccataatcccgattaaatgtccagaacttgcggttgctgtgccgcatgggtgtgctcagtgcccgcgtaaactttcagtttacggaacattgcacgacccagcgggcccttcggcagcatgcctttaaccgcgatttcaatcacacgctcaggacggcgggcaatcatctcttcaaaggtcgcttgtttgataccaccgatgtgaccggtgtgatggtaataaatcttgtctgtacgcttgttgccggttacagcaactttatctgcgttcagaacgatgatgtaatcaccagtatcaacgtgcggggtgtattccgctttatgcttgccgcgcaggcgacgagccagttcagtagcgaggcgacctaaggtcttaccgttcgcgtcaacaacataccagtcgcgttttacggtttctggtttagctgtgaaagttttcattaaaagcttacccaattataagttacacgttggtgaacacccaaacgctcaaatcaacagttgaggctcacacgaccatcaagtccagcaaacctaccccttcgaatagcctatgctggcactataaagtttttgggaaaaaaactttattgtaacgtggggtcgcaagattatagagaagtcggttgcaaagatcgaactgtttttggcgtgagaagcataaaattacaggtgttcaatcgggcgatcaacgatcgccctggcgcagaatagcatgtttaaccagcaatgtgcgagcaacgacgtcaatatactgcaacctgacgttttacggcagatgaggcagtttaaggtactcttcgctctgcatctcttgtaggcgcgataaacagcgttgatactcgaattttaagcgctccccctgataaatttcaaacatcgatgcttctgcagagataattaacttcactcgacgttcgtaaaactcatcaaccaacgctaaaaaccggcgtgcggcattttcttcctttgccgtcatcaggcgcaaattgtgaagtaataccgtgtgatactcgcgggacagcgctatgtaatccaactgactgcgagcttcttcacataatgtatggaaatctaccgccagcacgccatcagcagcgctaatagctgccagcgggcgatgattaatctccaaaaccggcttttcttcccccactttccccgccagtttaataaacatctgacgcatattttgttcggtttgcgggtttaacggcgtgagatacaagtgtgcctgcgtgagtgtccgtaaccgataatcaataccggcatcgacgttcatcacttcgcaatattctttaatcagggcaatagcgggaatgaagcgcgctcgctgtaaaccgttttgatagagattgtccggcggtatgttagaggtggcaatcaacgtgataccgcgagcaaacagagcctgcagcagcgtagccagcagcatggcgtcggtgatatccgaaacaaagaattcatcaaagcacaacacatcggtttgagctttaaatccgtcggcaattatttccagcggattttcatggccttgcagttcggccaattcctgatgaacccgcagcataaagcgatgaaaatgcagccgaagcttacgatcgccgggcaaactgtggaaaaacagatccattagccaggtttttccgcgcccaacgccgccccacatatataacccctgtactgggggagtgaccgctaaagcgtggtttcttcctaataaacgactcaggcgaccacgcagacccagcgtgggtgtcggccgatttgcccgctcacacaaagccaaataaatctgttccagttgctcaaccgcttgacgctgaacctcgtcgggctgatattctccagcggctaaagcctgctgataacgtgctgtaggtgtactaggttgcatgtttttcaacaatccctgataaaatatttatctgtttttcgctgcgcttttatgctgatttatctggtaatcgacgcatttaacgacggtaatgccatcggaaaaagtatgataaccataggcaaagttgcatcaggattccactctgacaaggttaacggttatagtgggtattattagtgaaaaagccctaccgaacaatgaagtcaaaaaaggagtcattatgacctgggagtatgcgcttattggattagttgttggtatcgccatcggtgcggtagccatgcgctttggcaatcgtaaattgcgtcagcagcaagtgctgcaaaacgaactggaaaagagcaaatccgatctggaagaatatcgtcaggagttggttggtcatttcgcccgcagtgcggaattgctggacaatatggctcgtgactatcgtcagctgtatcagcacatggcgaaaagctcgaataacctgctgcctgatttaccaatgcaggacaacccgttccgctaccgtttgaccgaatccgaagcggataacgatcaggcaccggtaaaaatgccgccgcgcgattattccgaaggggcgtccggtttgctgcgtcctgaacatcaaacccgcgattaatctgacctatcaatatgttgtccagatagcgcactcccccgcgctatctggttatctttaatttacccttcttttacagttctatacttaccactccttgaatcaccgacccccgatccctatatgatggaatatcacgtggtcgcttctggcggtaatcgcagtagctttttgaaataagtgaattttttaccggtccaacggtcttagctttcagtgggcctatgccgcaatatcactaattcattcaccgttaggtattgagagagtttaatccaatgaaaaaaaagtcattacttcttagtgcactagctataagcgttggccttagccttgccgctgcaccggcggttaccgcagcccccttgccaatggccgtcgccggacaacctttgccaagccttgcaccaatgttagaaaaagtcctgccagcggtagtcagtgtccatgtgaccggcactcaagcgcagcaacagcgtttaccggaagagtttaaattcttcttcggcccgaatgcgccgatgagcaaagaaagcatccgaccgtttgaaggcctgggctcaggcgtgattattaacgccgagaaaggctatgtgctgactaataatcacgttatcaataatgcagataaaatccgcgttcagttgaatgatggccgtgaatatgatgccaaactgctggggcgcgatgagcaaaccgatattgctctgttacagattacggatgccaaaaacctgaaagcgattcctatcgcagattcagacaatctgcgagttggtgatttcgccgttgcggtcggtaacccattcggtttaggccagactgcaacatccggtattatttccgctctgggccgcagtggcctgaatctggaagggctggaaaactttattcaaaccgatgcttctatcaaccggggtaattccggcggcgcgctggttaacctgaacggcgaacttatcgggattaacacggccattctggctccgggcggcggtaacatcgggatcggctttgccattccgagcaatatggcgcaaaacctaagccagcaactgattgagtttggtgaagtcaaacgcggcgttttaggtattaaaggcagtgaaatgaccgccgacatggccaaagcctttaatatcgacgcgcagcgtggcgcattcgtcagcgaagttatgccgaaatctgctgcggcgaaagccggtattaaagccggtgacgtattggtttctgtggatggcaagccaattaacagcttcgccgagcttcgcgctaaagtcggaacgaccgggccgggtaaaaccatcaaagttggcttactgcgcggcggcaaaccgctggaagtctcggtaacgctggaaaacagcaacccgacctccaccagcgccgaaaccctgtcttcatcattacagggtgcgtctttgagcaacaccgaaattaaaggcgtaggcaaaggcgttaaagtcgataacgtcgctaaaggttccccagctgcacaggccgggttacagaaagatgatgtgatcatcggtatcaaccgtcagcaaactaaagatatcagcgagttacggaaagcgctggcaactaaacctgcggtgatggcgttgaatatcatccgcggcaacgaaaccatttatctattattacgttaatttgtagaaaaatcggacacagcacaatgctgtgtccggttaactcatgctattctgccatcacctatctttcatgccttaaacctcatgtttattaagctattgcgatccaccattattgggctgattgttgccggtatattactggctgcgctgcccgttttgcgttcgcccggttacctgttcgccggaaaagcagagagcacagatagtgaagttcccgttagctacaaccttggggtgcgcagagccgcgcctgcggtagtcaatgtgtacaaccgcagcatgggtgccaccgctcaggacggtctggccattcgcactctgggttctggcgtgatcatgagtgacaagggctatattcttaccaacaagcacgtggtgaataacgctgagcagattattgtggctctgcaagatgggcgcgtgtccgaagccttgctggttggctccgacaatatgaccgatctggccgtgctaaaaatcgatgcgggcaatttgccggttataccgattaataaccacagaatcccacatgttggcgatgtggttcttgccataggtaacccttataacctagggcaaacaattactcagggcattatcagcgcgactggacgcataggtttaagctcatccggtcgacaaaacttcctgcaaactgatgcatcgatcaatcagggaaactcggggggcgcgctggtcaactctctcggcgaattggtgggaattaatacgttatctttcgataaaagtaacaatggcgaaacgccggaaggcattggcttcgcaattcctaccgttttagccactaaagtaatggaaaaactgattcgcgatgggcgagtcattcgtggctttatcggcattaccggcggcgattatccgccgttccacgccaatacccgcaatgcttcctctaatctggagcgcattcacggtattaaagtgaatcaggtttcgcctaacggcccagcggcggcggcaaatatgcaggtcggtgatattatccttagtgtgaataacaaaccggcaatctctgcagtagaaaccatggatcaggtagccgaagtccgtcctggcaccactattcccgtggttattctgcgcaatggcgaacaaatcaccctgaacttaactatcagtgaatatccagacagctgatgggatgaaataatctgagttacaggcaaaaaaagccggtcagttgagaaacctgaccggcttttttatatctgggttcggttaaatctggcatgactacatacctgccagattaaatctcagttagctaagccgcagcaaagcttactccccttgcactcgttcgatgttggcacccaacgcacgcagtttgtcttcaatacgctcgtatccgcgatcgatgtgatagatacggtcaacgatagttacgccatcagcgatacaacccgccaataccaagctggctgaagcccgcaggtctgttgccataacctgcgcgccagagagctgtttaacgccatggcaaatcacggtgttgctttctatttctgcacgagcgcccatacgaatcaattcaggaacgtgcataaagcggttttcgaagatagtttcggtaatcacgccagtaccttcggcaaccagattcagcaggctgaactgcgcttgcatatccgtcgggaaacctggatgcggcgaggtacgcaaagtcacggccttaggacgttcaccgtgcatatccagactaatccagtcctcacctacttcaatatccgcgccggcttcacgcagtttcgccaataccgcatccagagtatccggacgggttttgcgacacacaactttaccgccagaaatcgccgcagccaccaggaaagtaccggtttcgatacgatccggcagtacgcgataaacgccgccgcccaaacgcgccacgccttcgattgtgatgcggtcagtgcctgcgccggtaatttttgcacccaacgtgttcaggaagttcgcagtatcgacgatttccggttcgcgggctgcgttttcaataatcgtggtgccttcagccagtgtcgccgcactcataatggtgacggtcgcgccaacgctgaccttatccataacgatgtgagcgcctttcaggcgaccgtcaacggaggctttaacgtagccttcttccagtttgatttcagcgccaagctgttccaaaccagagatatgcaggtcaaccggacgagcaccgatagcgcagccgcctggtaaagaaacctgaccgcgaccaaaacgcgcaaccaaaggccctaacgcccaaatggaggcgcgcatggttttcaccagatcgtaaggcgcgcagaatacatcaaccccgctggcatcaacaaaaatcgagccattacgctcaattttagtacccagttggctcagtaatttaatagtggtatcgatgtccttcagatgaggaacattctgtaattccaccggttcttcggccaacaacgcggcaaacataattggcagggcagcgtttttagcgccggaaatagtgacttcaccacttaggcgagtccgcccctgcacacgaaatttctccatttgactactctctgttgtcagattcgatgtcgctgttcgccgtagccaacagcattaaaagccgttaagtttgcgatcccgctgccactcttgaggcgtataagctttgatcgataaagcatgaatgcggttatcagcgatgtattccatcaaaggcgcatacacagcctgctgtttcttcacgcggctcatatcggcaaataactcaccgacagcaatcacctgaaaatgactaccgtcgccggtcacgtgtgcttcctgtagtgccaatgcgttcatcagcacatctttaatttcgttggtatccataatattcattctattttcagaggatcataatcagtcaaacatagtagatgaatacggcgagctcttaaactaaagaaaagcccctgtgtcgtaagttacgtacaggggccagaatgccgttatgctcaactaaggtcgtgcgacgcgctaagttgccgccgtgactggaattatttcctgtaagttgtataacgtaatcagcgtcgccaaacgatcgctgacgcctgaaattttcagctcgacgcctcgctgatgcaacgcttcacgtaaatgaaccagcaacgccaaacctgaagagtcaacacgctgtaactgcgccacattcaggcaagttttatccgccagcaaagcgttccgctgctgccacagtggcagcaaggtttcacgatccagatccccaatcagccacagcgtgctgccttgggattcccagcgaagctcatctgccataattatttttgatccaacgtaataggctgtttggcggcgattaacaattgcttagtcaaaccgtctacaccctgagtgcgcaaaatcgatgcccattcattctgcttggtgctgatcatgctgacgccttccgcaatcatgtcaaaggcttgccagtgaccagtttgactatttttacgccattggaaatccaaacgcaccggaggtcgtccattggggtccaaaatggtgacgcggatagcgataatattagcatcacccagcgggtgttctggcgcaatttggtaagtttgaccgtgatataaagccaatgcctggccgtaggcctgttccagatattggccaaaagcgttgaaataggcttcgcgctgagctggcgtggcgcttttgtaataagtgcctagcactaaggctccggcgtatttaatctgcacgaacggcatcagttcttcatgaacgatggtgcgcagataatctggattctgcttaattttaggctgttcgtttttcagacgagtgaaagttttttgcgctgcatcgtccatcagacgataagggttggtttgatccacggcatttgccaacggtgccaccaccaacagtgcgaccattaataaacgtttaaacattcaaatgccctcttaatgaatttgagccgcaggaggagtagaaccccctgccggtgcagtttcaggggtttcctgattattaccgccgcttttgtacaggaactggccgattaaatcttccagaaccaatgcagatttggtgtcctgaatggtgccaccctctttcaaaatactggtgcccatttccggatcttcaaaacccacgtttaacgccagatattgttcgcccaataaacctgaggtacgaatcgctaaagagctggtatcaggaattcggttatattgatcctctatatcaatcgcaactcgcggactgtaatttttggtatcaagagtaatatcggccacccgtcctaccactacaccaccaattttaaccggtgaactggctttcaggccgccaatattatcaaaagtggcatatatccggtaagtaggctgattgccaacagatttaatatccgccactttcaggcataaaaagatgattgccgctaaggcaatcacgataaataggcccacccagacttcagttttcttcgtttgcatcgactcaattcccaaacatcagtgctgtcagcacaaaatctaatcccagtaccgccagtgatgaatgcaccacggtacgggtcgttgcccggctaatcccttctgatgttgggattgcatcatacccattgaacagcgcaatccaggtcacggtaatggcaaataccagactcttgatcaggcaattcagtaaatctgtacgccaatcaaccgcgccctgcatggctgaccagaagaagccgctatcgatacctttccagtccacgccaaccacggagccaccccagataccgactgcgacaaaaattgccgtcagcagaggcatactgattaaaccggcccaaaagcggggcgcaacaacccggcgcaatggatcgatagccatcatttccagactggagatttgctcggtggctttcatcaggccgatttctgcggtcagcgcagaaccggctcgcccggcgaacaataacgccgtcaccaccggtcctagctcacgtagcaaggacagtgagaccatcatgcccagactggcttctgcgctataggtggtcagaatcagatagccttgcaagcccagcaccatgccgataaagaggccagaaacgacaataatcagcagggattgtacccccacgctataaagctgctttaccagtagcggtaactgcttgcgcggttgcgggcaaccaattatggcgttgaacaacatcaatcccgctcgcccgaacgtagcgcaaatattaatacctttgcggcctacggacgctaacgtctgtactaacatgaacactccatcagcctaatagctcggttttataatcgcccgccgggaaacggaatggtaccggcccgtcagcgatgccatccaggaattgacgcacccgaggatcgctattggtttgtaactgcttcggcgttccttcagcaataacatgctgatcggcaacgatataggcataatccgcgatgctaagcacttctggcacatcgtgagaaaccacgacgcaggttacgcccaacgcatgattcagctcatcaatcagcttaaccaatacccccatagtgattgggtcctgcccgacaaaaggctcatcaaacatgatgagttcaggatccaatgcaatagcccgcgccagcgccgcacgacgagccataccgcccgaaagctcggccggcataagatttgccgcaccgcgcagccccacggcttccagcttcatcatcaccgtgctgtgtagcagttcttccggtagatgaccatgttcgcgcagcggaaaagccacgttttcaaacaccgtcaaatcggtaaacaaagctccagactggaacaacatgctcatttttttacgcacgtcatacaggcgatgtctggaaagtgatggaatattatcgccatcaaaccagatttcaccggcgtccggagttagctgcccgccaatcaaacgcagcagcgtggtttttcctatacccgacggccccataatagcggtgactttgcccttaggtacggtcatgttgatatctgtaaaaatagggcgctctccgcgggtaaaactcatcctacggatctcaatcagattagacaccggctgattcatgcttatttatcccttcaggccgtttattacctatttaaccgccaatgctacagtaaatggagtcaataggtgtaacgcgtagcattcttacaacttatttgcgctttttcgtagccaaagtggccataagttttacttttccgacgcccacagtcaaaattagtgcattaagagaatgagagcgaaagctcaaacaaatgccctttcgccaacggaccggggattatacccaataaggactctgcatgtttcttgcgatagcattattaatcgttggcttggttttattggtgtacggcgcggatcgcctggtgtacggcgccgccgttttgtcccgctcgttaggtgttccaccgttaattatcggtatgaccattgtcggcatcggcacctctctacctgaattgattgtttcagttacggccgcactcaataaccaaaccgatatggcggtgggtaacgttatcggctcaaacattaccaatttgctgctgattattggcggagccgcgtttattcgcccgctgacggtaagatcagaaattctgcaacgagaactcccgttaatgttggtggtcactgttctgtgcggctttgtgctatctaacaattatcttagccaatgggatggggttattttactgactgccgccgccgcttttatcaccctgatgttgaagattgcccgtctggcgcacaatgaaggtaacgatattcttacccgcgagcaattatcagaattgcctcaggacagcagtaataccgtggcctgtctgtggctggtgctggcgtttattatattaccgctttccgccaaaattgtggttgataatgccacggtgattgcccgcttctttgggctgagtgagttagtcattggtttaacagtgattgccatcggcaccagcctgccagaattggcgacttctatagccggcgcactaaaaggcgaggatgatatggccatcggtaatatcatcggctccaatatttttaatatcgtgatcgtattgggcgtaccggcgttattgtctccgggtgcaattaatccggaagctttccagcgagattactgggtaatgctggttgtaagcgtcatatttaccctactttgccttgggcgaaaacaacgaatcggtcatctggccggcgctctgttattatgtggctttatcgcgtaccttgcggtgctatttttcgcccctttcagcgcagtattataaaacgagcgggaactgagtatgtcgaacgttgctttgcatccggatgtagattttcaacaggccggtaaacaggtattacagatcgaacgtgatggcctggccgaacttgatcaatatattaatgaagatttcgctcgcgcctgcgagaaaatgttccattgtcagggcaagatcgtcgtgatgggcatggggaaatctggccacatcggttgcaaaattgcggccaccttcgccagtaccggttcaccggccttctttgtacatccgggggaagctagccacggcgatttgggaatggtaacaccgcaggatatcgtgctggccatttctaattccggcgaatccaacgagattctggcattgattccggtgttgaaacgtcaacgcattccattgatctgtatgacgaacaatccaaacagcaccatgggcaaggccgcagatattcatttatgcatcaaagtgccgcaggaagcctgcccactgggtctggcgccaaccaccagcactaccgcgaccttggtgatgggcgatgcattagccgtcgcgctgctgaaagcccgtggctttactcaggaagacttcgcgctgtcccatcccggcggcgcactggggcgtaaactactcttgcgcatcagcgatatcatgcacactggcgatgatattccccacgtcagtcccgatgcttcgctgcgtgatgcattattagagatcactcggaagaatcttggtttaaccgttatctgtaacgacttgatgaagatcgagggtatctttaccgacggcgacttacgccgcgtatttgatatgggtatcgacctgaataacgccaaaattgccgatgtaatgacccgcggcggcgttcgggtacgcccgaatattctggcggttgatgcgctaaatctgatggaatcacgtcatatcaccgcgctattagtggctgacggtgaccaattattgggcgtggttcatatgcatgacatgctgagagcaggcgtcgtataaaggatatggaatgagtaacactgagtatgcggacacttgctacgggccggtaaccgcagatgtaatgcaaagagcggccaaaatccggctgctgatttgcgacgtggacggcgtgatgtccgacggcctgatttttatgggcaacgatggcgaagagctgaaaagctttaatgtccgcgatggttatggcatccgctgcctgctcacctctgggattgaagtggccattatcaccggccgttcagcaaagttactggaagaccgagctaaaaccttggggattactcatctttaccaagggcaacccaataagcttttggcctatggtgaactgttagatacactctcctgtcagcctgaggaagtcgcgtacatcggtgacgacctgattgactggccggtgatggcacaggttggtttatccgtagcggtggcagatgcccaccctctgctgctacctaaagcacattatgttacgcggataaacggcgggcgcggtgcagtgcgtgaattatgcgatttaatactgctcgcgcaggataagctggaaggtgccgaagggttgtcgatatgagtaaaacaaaattttggatcacgctaatactggcgttgattacgctgtcgctgattggctggaacttttccggatttaatcagaaagatcagaatattccagtcgacgataatgaaccgacctaccaaagtcagcatacggtgacggtagtttataatccggtcggtaaactcaattacaaactggtggcggaagatgttaaaaattacaccaccaaagaggtgacctggtttaccaaaccggtcatgaccatgtttgatgaaaatgccgtagcgacttggtcagtccgcgccgatcgcgccaaactgaccgatgacagaatgctgtatttatacggtaatgtggtcgtggacagtttaaccaccacttcgcaattgcagaaaatcaaaaccgataatgcgcaggttaatttgatcactcaggatgtatcctcagacgatgaagttaccctttatggcattgggtttacatctaacggcatgaaaatgcgtgggaatttgcggaacaaaaccgccgagctgattgaaaaggttaaaacctattatgaaatccaaaaataaaatgcgtcacctcctgattgccagctcgcttttggtcgcaagcgttccggctctggcattaaccggcgataccgatcagccaattaatattacgtcggataaacaagctctggacatgaccggtaataccgccactttcacggacaatgtgatcgtgaagcaaggtagtatcgaaattaaagccgataaaatggttattactcgtcccggcggcgatcaaagtaaaacggtgatcgaaggttttggtaatccggtgactttctatcaaatgcaggacaacgggaaaccggtaaaaggccacggccagaaactgcgttatgaagtggccaaagaattcgttattttgaccggtaatgcctatctggaacagctggatagcaatatcaaaggtgacaaaatcacctacctggtgaaagagcagcaaatggaagccttcagtgataaaggcaagcgagtcaccaccgtgctattaccatcccagttacaagacaaaggcccaaacgctaacggccaaaagaagagtaagtaaaaacttatggcaacattaatcgcagaaaagctggctaaggcttacaaaggccgtaaagtggtcgaagacgttagcctgaaagtgaattccggtgagatcgttggcctgctgggcccaaacggtgccggtaaaaccaccactttctatatggttgtcggtatcgttcaacgggacgccgggcgtatcgtgattgatgaagaagatatcagtctgctgccgttgcatgaacgcgctcgtcgcgggattggctatctgccgcaggaggcctctatcttccgccgcctgagcgtctataacaacctgatggccgtgctggaaattcgcaacgacttgtccggcgaacaacgtaaagagcgtgctgaagagctgatggaagaatttcatatcacccatctgcgcgacagcctagggcaatctctttccggtggtgaacgtcgccgtgtggaaatcgcccgcgcgctggcagctaatccaaaattcatcctgctggatgagccttttgcaggcgtcgatcctatttccgtgattgatatcaagaagattatcgagcatctgcgtgacagtggccttggcgtactgattaccgaccataacgtgcgggaaacgctggacgtttgtgaacgagcctatatcgtcagccaggggcacttaatcgcccacggcacgccgcaagaaattctggcggatgagcaggttaagcgcgtctatttaggcgaagaattccgcctttgatgtttgtttttttggttcgtgattcactaagggaaatcgccgtaatcctatgaagcaaggtttgcaactcaggttcagccaacagctggccatgaccccccaactccaacaggctatccgtttgttgcagctctctacgcttgagcttcagcaggagattcagttggcgctggaaagcaacccgctgcttgagcaaacggatgtccacgaagaagtcgacgccaaagaggttgaggagcgggacgatctggatacccgcgaagcccttgaacaaaaggatatgccggaagaactgccgttagacgcgacttgggatgaaatttataccgccggtacgccttcaggtatgggtaatgattacagcgacgatgaactgccggtttatcagggtgaaacgacccagtctctgcaagattacctgatgtggcaggtggaactgacgccgttttccgataccgatagcgccatcgcgacctccatcgtcgatgcggtggataacactggctatctcaccgtgccgctggaagatattctggaaagcatgggtgatgaaagcctgacgctagaagaagtggaagcggtgctaaaacgcatccagcattttgatcctattggcgtagcggcgcgcaatctacgggaatgtctgttggttcagctctctcagtatgcaaaagagacgccttatctgaacgaagccaagttgatcgtcagcgattatctggatttgttaggtaaccatgatttccgcacgatgatccgcttaagtcgcttaaaagaagatacacttaaagaagcgatcgcgctgattcagtctttggatccgcgccccggccagtcgatcaataccggtgagtccgagtatgtgattcctgacgttctcgtacgcaaagaacgcagcggttggacggtagaactgaacgcggacagcattccgcgcctgaaaatcaatcagcagtatgccgccatgggtggcagcgcgcgtaatgacagcgacggtcagtttattcgcagtaatctgcaagaggcaaaatggctgattaaaagcctggaaagccgcaacgaaacgctgcttaaagtagcgcgttgtattgtcgaacagcagattgagttctttgaaaacggtgaagaacatatgaaacccatggtactggcggatatcgcgcaggccgtggatatgcatgaatcgacgatttcccgcgtgactacgcagaagttcctgcacagcccacggggtattttcgagctaaagtattttttctccagccatgtgaataccgaaagcggaggcgaagcctcttctacggcgatccgggcattggtgaagaagttggtggcggcagaaaaccctgccaaaccactgagcgacagcaagctaaccaccctgctttgcgagcaaggcattatggtggcgcggcgaaccgttgcgaaataccgagagtcgttatccatcccgccgtccaatcaacgtaaacagttggtttgacccgaacagagaaggaagacactatgcagctcaacattaccggacatcacgtcgagataaccgaacctttacgcgaatttgttaccacgaaatttgccaaacttgagcaatacttcgatcgtattaatcaggtctatgtggttttaagcttggagaaagtgcaacaaatagcggaagcgacagtccatgtgaatggaggagagttgcatgcaacctcggaacaccaggatatgtatgcggccattgacggtctgatcgataaattagcccgtcaattaaacaaacataaagataaattaaagcaacattaagaacatgatgaccgccagacttatatgccatacagatttcaggatacaggaaggccgcaaaccaaagaaactcataaacttacatcactaagtgattgggtgaatgatagcagccaacaccaagtagtttgaaaaataacggatatatagtctaaagggaaaggttcttcactcactgtagccagtcgcgctacattacctgagtcggcgacatggattgaccagccgccgacatcaggagtgaaacagcgcttaagtgaaagatgagatgaccaacgatttagccatgcaattagactcggtattaaatatcgagtgcaccaaaagctccgttcactgctcgagtaaaaaacgggcactggaaatcatcagcgagcttgctgccaagcagcttaacttgccgtcacaggtcgttttcgacgctgtgctaacccgcgaacgtatgggcagtaccggtattggtaatggcatcgccattcctcacggcaagttagaggaagacacgctgcgtgccgtcggcgttttcattcgtctggatcaacctatcgcttttgatgctattgataatcagccggttgacctgttatttgccttgctggttccagccgatcaatgtaaaacccacctacatactttatctttagtcgctaaacgattagcagataaaacagtgtgtcgacgtttacgagcggcacaaagtgatgatgagctgtatcaaatcattacagaagttccggctgaaactcaatgataaagctagcttttctgccgtaacgctcttattttaccagtgatggattccggcctgtaagccggaataaaagtttctaattgtggcgcataacgccattgagatacctaggggagttgccacatggtgctgatgattgtcagcggccgttccggttcagggaagtctgttgccttacgtgcccttgaagatatgggcttttattgcgtcgacaacttgcccgttgtgctattgccacagctggcgcaaacgctcgctgacctgaacatctccgctgcggtaagtattgatgtccgcaatatgccggaatctccggaggtattcgaacatgccatggctcagttgccggacactttctcaccgcagctgctgtttttggatgccgatcgcaataccttgattcgccgctacagcgatactcgccgcctgcatcctctctccaataagaatctgtcgttggaaagcgctatcgatgaagaaagcgccctgctggagccactgcgctcgcgcgccgatctgattatcgatacctcggaaatgtcggtgcatgaactggccgaaatgctacgtactcgcctactcgggaaacgtgagcgtgaattgacgatagtatttgagtcattcggcttcaaacacggcttacctattgatgcagactatgttttcgacgttcgtttcctgcctaacccgcactgggatccaaaactgcgcccgatgaccggtttggatcgccccgttgccgccttcctcgatcgccatacggaagtgcacaattttatctatcaaacccgcagctatctcgagcagtggctgccgatgctggaaaccaataaccgcagctatctaacggtcgctattggctgcaccggtggtaaacaccgttcagtttatgttgctgaacagcttgccgactatttccgctcccgtggcaaaaacgttcagtctcgtcatcgtacgctggaaaaacgtaaataatgaccgtcaaacagaccgttgagatcaaaaacaagctgggcatgcacgccagaccggcgatgaaattgttcgaactggtgcaaagttttgacgcagaggtcatgctacgcaatgacagcgggacagaagccgaagccagcagcgtgattgcgctgctgatgctggattctgccaaaggccgccagattgaggtggaagccaccgggccagacgaagtgtctgcgttggccgcagtgatcgaactgtttaattccggcttcgatgaagattgatatcggctatttatgcgcgatatcagcctttggttaaaagagtatttggctctttgctggcgtcatcggctggagccttcggtttcaccgcctgattttactcacttctgaatgttttttactcttcgagatatcttcgccctgattaatttatcctcggccctggtcactctcttcctcccgcttaaccgccgtcgcaaaaccgctgcgtaataaaacccgctgggtaatcgtttgctaattgcaaaaaatgcacggtttaccccttgcagagaacgcaggcacgagtataattcgccacaatttgccgggagaatccatgaaaaacagcgagcgttttgttgaatatcatcagattgaaaatcgacaaaatcgtctgccaattggcggtcagctgccgtggtttctgccgttgccaaaccgatcttatcaggcccctcgttgaggggcttttttttgcccgccaaacggacggcgatgtcgaatgccaggcaaatagattcacgattttatattcacgctgattttatatttactctgattttacattcacgctaaagacacaccaggggcagccccatgccacgggctagcacagaggagagcgaaacatggccaatccgttgtatcaaaaacacattatttcaattaacgatctcagccgcgaagaactggaactggtacttcgcaccgccgccagcctgaaaagccatccgcagcctgaattgttaaagcataaagtgatcgccagctgtttcttcgaagcctccacgcgcactcgtctgtcctttgaaaccgccatccaccgcctgggtgcctccgtcgtgggtttttccgatagcagcaatacttcgttaggcaagaaaggggaaacgctggcagataccctctccgttatcagcacctacgttgatgccattgtgatgcgccatcctcaggaaggtgccgcacgtttgggcgcagaattctccggcaatgtaccggtactgaacgccggtgatggtgctaaccagcacccaacccaaaccctgctggatctgtttaccattcaggaaactcaggggcgtctggataatattaatatcgcgatggtcggcgatctgaaatatggccgcaccgtgcattcactaacgcaggcgctggcgaaatttaacggtaaccgcttcttctttatcgccccagatgcgttggcgatgcccacttacattttgaaaatgctggaagaaaaaggcattcaatacagcctgcatgccagcatcgaagaagtggttccagaactggatattctgtatatgacccgggtgcaaaaagagcgtctggacccatccgaatatgccaacgtgaaggcgcagtttgtgctgcgggcggccgatctggccgacgcgcgcgatcatctgaaagttctccacccgctgccgcgtattgatgaaatcactaccgatgtagataaaacgccgtatgcctactatttccagcaggccggtaacggaatttttgcgcgtcaggcgctgttggctctggttttaaacgctgaattggctctttaaggggaaaggtatgactcaggattacaaactacaggtagaagcgatcaaatgtggcacggtcattgaccatattccagcacaaatcggctttaagctactgtctctgttcaaactgaccgcgaccgatcagcgtattaccattggcctgaacctgccgtccaatcaactcggccgcaaagatctgatcaagatcgagaacactttcctgaccgagcaacaggcaaaccaactggcaatgtatgcgccacacgccacggttaaccgcatcgataattacaatgtggtgaagaagctgacccttagcctgccagatcgtattgacggcgtgctgacctgcccgaacggtaactgcattagccgtaacgaaccggtcgattccagtttccaggtaaaagctctgcgagatgaagtgttgctgaagtgcaaatactgtgagaaagagttcgaccatcaggtggtgatgcaggccgattaatccgggaagactcgctgtctccgccgcgacttactcagcggcggacactgtgaactaccgcaatcattttatttccttaggttgccgtaattcccctccgccctataatagcggtgattacagagtatccctttccgctttacgtaaaccaggagtcaacatgtcacgtattatcagcactgagcttgcccccgcagcgattggtccttatgttcaaggtgtcgatctgggcagcatgatcatcacttccggccaaatcccggttgacccaaaaaccggcgcagttgccgaagacgtttcagctcaggcacgtcaatccctcgaaaacgtgaaagccattgtcgaagcagcaggcctgaaagttgcagatatcgtcaaaactacggtattcgtgaaagacttaaacgatttcagcacggtcaacgcgacttatgaagccttctttgctgaacataacgcgccattcccagcacgttcttgcgttgaagtcgctcgcttgccaaaagacgtaaaaatcgagatcgaagctatcgccgttcgtcgctaatcccgacggcgtgccgatcacggctgactcacgtcagccgtgatagcttagcgtcgcatcagacactcccgtcataacatccctgtctgttcatcctccctgatttgctaattccttcataaagagagcatcctgcccttaattgcggccatagttataatgtatatataaatcaatacattgcataaataaaacagtttatgaataaagtagtttatggaaaaagtagcgctataatccaaaccggggcgttactttttaatccagtaaataccctcataaggtcgaagttccatcgcctctggatgaactggggcatcgtcgtaactgctcatcagcaatgaccaaccgcctaactccagattttctggctgccatcccatcggcttattgctaagattcgctaccaccagcaaacgtttatcctgccaactgcgtaaataacaccacaggctaggatgttctgggcaaagatcctgataatcaccgtaggtgaaaatatcctgctgtttgcgcaaggcaatcaggcgctgataggcgtaaaacactgagttttcatccgccagcgctgcgctaacgttaacttctggatagttgttgcacggcgagatccacggcgtagcctggctaaaaccggcgttagcactgttatcccactgcattggcgtgcggccattatctcgtgacttagtggctaaaatcgccaataactcatcggcctgacgcccggactcactcagttcagcaaacatattcaggctttcaacatcgcgatactgctcaatcgaagtgaagccagggttagtcatgcctatctcttccccttgataaatatagggagtcccctgcataccgtgcaataccattcccaacatcttggcggcagggacgcgcagcggtccttcatcaccaaaccgggaaacaatgcgcggctgatcgtggttacaccagaacagcgcgttccacgcctggttatgcataccctgctgccaagtggagaaaatactttttagttcaaccagatccggctcggccagcgaccatttttcaccgttcagataatccactttcagatgatggaaattgaaagtcatcgacagctcgccaccgtttaacgccgcataacgctggcaatgctctaaacgagtggacgacatttcacccacggtcattaaaccgcgaggctggaagacatcgcgactcatctcttgcaggaactcgtgaatgcgcgggccatcggtatagaagcggcgaccgtccccatcaaaatcgttggggaagtcctgctgtttggataccaaattgatcacatctaaacgcagaccatcgacgcctaaatcggcccagaactcgcagacttttttcagctcatcccgtaccggctggtgctcccagtttaaatccgcctgctcggtggcaaacagatgcaaataatattggccgctttccgcatgccactgccaggcattaccgccgaattttgagcgccaattattaggtagctgatccccttcaccgtcgcgccagagataaaattgacggtacgggctggccggatcttttgccgcctggaaccaggcatgttcagttgaagtatggttgaacaccatatccattacgatacgaataccgcgctgatgagcggcttcaaccaaggttttaaagtcttccaacgtgccgtaagccggatcgatggcacaataatcagccacgtcgtaaccgttatcaacctgcggagagagatagaccggcgtcagccaaatagcatcgacgcccaatttttgcagatagtccaaacggctagttacaccggctaagtcaccgtaaccgttaccggtagtatcctgaaagctttttgggtagatctgatagatgacaccgttttgccaccagggaatgggattattcatagcgtgaactcttattcatttaaaaaattgccccgtaatcggtacggggctcgacgcatatcagaccggtaattccccacggctgtctttgcgtttataaaccagaatagtcaggaacaatggcacaataatcgccaccagcatcgccaacgaataaatcgcccagaacttcggctgtatggacaaaattcccggcaaaccgccgacgccaataccgttcgccataacgccacttaaaccgcaaattagaccagcgataccggaacccaccatggcacacagcattgggaagcgatatttcaggttaatcccatacatagccggctcggtaacgcccagataggccgaaatcgccgctggaaccgaaatttcgcgttcgttaactttgcggctaataatgataatgcccagtactgcggaagcctgcgcgatattggataaagcgattaatggccacaccggcgtgccgcccatgctttgaaccatttgcatatcaatcgccaaggtcgtttgatgcaccccggtaatcaccaacggcgcgtacaggaaaccaaacagagccgcgccaatcggcgcaaagctgccggtcattaccgctttcactccccaagccacgccatcgccaatcatacggccaaacggcccaatcaacgtatgcgccaggaatacggccaataacagagaaacaaccggaacaataaccagatacaggtaagcaggaatgattttcttcagattgacttcaatccaacctaaggctagccctgccaaaatggagggaataacctgtgcctgatagcccactttctcaatggtgaaccaaccaaagttccatacctccggcagttgctgtcccagcatgtaggagttcatcaactgcggcgaaaccagcgtaatccccagtacgatacccaataccggcgtaccgcccatttttttcactgtagaccagcaaatcgccaccggcagatagaagaaaatcgcctcgcccaacagccacaggaaatcgtagatggttttccacgccggatgcgcctgcgccagcgtcattccgtcggacataggaatatcgccgatcacattgcggaaaccgaggatcaacccgcctgaaatcagcgccggtaacaacgggaagaagatctcggcgaaatgggaaataccgcgttcaaaccaggtcatgttctgccgcgccgccaacttggtttgctctttatcggcttcggcatgaccaatggtggcaatcagagccttgtagtaatcatcaacatctggcccgataaccacttgaaattgaccggcgttggtaaagcagcctttgaccatccgcaagttttcaatagcttttggatcggccttggccggatcgtttaagacaaaacgcagccgggtaatacagtggctgacagtggcaatattctccctgcctcccaccaatacgatcagttgatcgatgtcttgttgctttactttgctcatttcaacgtacctttcataaggtgggatcccgcgcattgactgaaataaacacgcgaataattaaattagtggctcattaaagattagctactgatttgtttttatgaaatgggaacgttcccaagctgtgccgaagatcacaatttaacggctttttttgcttacttaaccagcaaaaaaagcatcaattggatcgatcagatcagtttcccggggatgatgatctgctgaatagcgaggccattatttaactgtccgagcagttgctgagccgcttgaacgcccgcactaccataacctaattcaacagaaaatgagttaggaaacaggaagttaagcaaaggcgcgttaccgattccgcacacctgaatatgctgtttcccctgctgttgcaggtacttactgacgcctaaagcgatggtatccgaagcacaaaccagcgcagacgtgtcgggtttgatcacctgagctgcctgctgaaaaccactttgatagctgagctcacctaacgtcaccgttggggtcaatccatggcgctggcagtagttcaaataggattgatggcgacgcataccggtggtggcatcagagggttgtacgccgatatagctaatgtgctggtgaccggctttgcgcagtttgtccatcaataacgtcaccgcaccatcatcgtcataacaaaccgaagaaaaaccgggatattcacgtgctagcaccaccattttatcctgccacggcgcaagcatttcagcggtcaagccggtaaaaccaaatacaatcacaccgtcaacgttacgctggcgcaaaatattcaggtgctccgtaaccagctctgcatcaaactggctttccatcaagataggatcatagccctgctgataaaatagcggcaacatggttcgtaccgcctgattctcagaagcagaatccagacgcgaaacaataatccctaccactttatcgctctgaccgcgcattgcccgcgctgatttagatggcgtaaacccttgttgacggataaccgcctccacccgctcacgggtttgcgggctaacgctgccttcattattcaatacacgcgataccgtggatttccccacgccgctcatacgggcaatatctttgatcgtcagacggttttgcatggtttacctaaggtttaggttaaaaagtataaactggactaattatttatctttaccctgataatagaaaggttatcccgcctataatcaaaagtatgactcatgatatacccaataaattttgagccacactcaggccccaatagcgggaatccctgaaagcttagcccattaaatcgatgggttaagtaaaaatagccaacggcgctatggatcaaaaagtgaaaggtatcatgccgttagatacacagatttcctacctttacgcggagtgattctgtaaaggtttttgtcaccgggtggatgtcgcctagcgcctaccctatcttttgtcttaccggaggttaattacccagtggaccccgttccccaatcggccccctacggctggctctggtaaggtgatgctccgttttcgctgctgccttaccagaaacaatctggtaggcagtaacgtgtcatagattcgctcgttcctgcttagcaatatttttgccattaccacggcagttttgtcgtggatgtaatcaggttcagcataatgaaagtgaaaaacctcgcccggcaaatgcttaacgcattgagccgcagtctgccacgccgccttatccgccgcgaagctatgctggacggcttgccgcaaaaaggtgtggccaaagaacttcccgcagaactggcgcagcaacgcctgcactgtgccaatgaaacgccgcagcagctctatgaccgttttagcagtcatccggaggggctgacagagccggaagccaacgccattcgccaacgccttggcgataataccattgaaaatcagcaagctgtgccttggtggttacatctgtggcactgttatcgcaatccttttaatctgctgttaacgctgctagcgctgatttcctacgcaaccgaagatctgaccgccgcgttggtcatcggcgctatggtgctgatttccactctgatgcattttattcaggaagcccgctccaaccaggccgccgacgccttgaaagccatggttagcaataccgctacggtgattcgcagcgatgcccataccgggaaaagcgagcatcgggaaatccctatttcccaattggttaccggcgatatcatcaaactctcagcaggagatatgatcccggcggatctgcgtattttgctcgccaaagatctttttatcagccaggctgcgctgacaggcgaatccttgccggtagaaaaaatcgctaccagccgttatcccgatgaatctaacccattagaacgagataccctgtgctttatgggaaccaatgtggtcagcggatcggcgctggctatcgttatcggcaccggtaatcagacttatttcggtcagttggccgaacgcgtcactcatcaggatgagcagccaaatgcctttcaaagcggcatcagtaaagtcagttggctgctaattcgttttatgctggtgatgacgcctattgttttactgatcaatggcttcaccaaaggcgattggtgggaggcggcactctttgccctttcggtagccgtcggtttaacgccggaaatgctgccgatgatcgtgacgtccactctggctagaggtgcggtgaaattgtcgcagcaaaaggtcattgtgaaacgtttggatgcgattcaaaactttggcgcgatggatattttgtgtaccgataaaaccggtacgctaacgcaggataaaatcgtactggaaagccataccgacgtctttggcgccaacagcgaacgtgtgctgcattatgcttggctgaatagctatcaccagaccggtctgaaaaacctactggatgtcgcggttcttagcgcaatggcggaatctgcctccaccaaagcgctgctcgattaccgtaaagtagacgaaattccctttgattttgaacgccgccgcatgtcggtggtagtggccattcaagccgattatcacgaactgatttgcaaaggtgcgctggaagaaatgctcaccatctgcagccatgttcgtcagggcaatgaagttattcctttgaccgaaatgctgctgactcgtattcgccgcattaccgatgagttaaatcaacaggggctgcgagttgtcgccgtggccaataaaatcttaccggcgaatcatctggactatggcgtagccgatgagtccgacctgattctggagggttacattgccttcctcgatccaccgaaagaaagcactgaacccgctctgcgggcgctgaaacaaaacggcgtgaccgtcaaaattcttaccggtgataacgagctggttgcgcgaaaagtctgtaaagaagtcgggctttccgtcgatcaagtactgcttggtagcgatattgagcaaatgagcgacgaggaactgaccgccgccgcccacgctactacggtatttgccaagctgacaccgctacacaaagaacgtatcgtgcaaattctccgtaatgcaggtcatgtcgttggctttatgggcgatggtatcaatgatgcgccagctttacgggcggctgacataggaatttccgtggattctgcggtagatatcgccaaagaagcggcggatattatcctgttggaaaaaagcctgatggtattggagcaaggggtcattgaaggccgccgcacctttgccaatatgctgaaatacatcaaaatgactgccagttccaacttcggtaacgtattcagcgtgctgattgccagcgcctttttacctttcctaccgatgttgccgctgcatctgctggtgcaaaacctgatgtatgatatttcgcaaattgcgattccatttgataacgtcgatgaagatcagttgaccaaaccacaacgctggaacgccggcgatttggggcgttttatggtgttctttggcccgataagttcgatattcgacgtgctgactttttctctgatgtggtgggtatttaaggccaacacgccagaaatgcagactttattccagtccggttggtttgtagaaggtttgctgtcccaaacgctgattgtgcacatgattcgcaccaaaaagattccgtttattcaaagtcgcgcttcatggcctctgtgtttaatgacgctggcagtggtcgtggtgggtatcggtttaaccttctctccgctggctggtttcctacagttgcaggctctgccgctcagctatttcccatggctgattgtgattctgaccggttatatggtaacaacgcagttggtaaaaggctggtttgtccgccgctatggctggcaataacggtcagatagccagtatcccaaacagatagcaggaggttgaatatcctcctgcttttattctggcaacatgatatggggtattaaaaaatggctacgctctcttattttcgggattagatgcgccctaaacaatcgatcgcaatgcctttaaaactttcaaagttctggctactgagcagacggctcattgagcgttcacggacaaaggtaacaaacagatcgtagatagccatcgcttcttcataatcacttttactgattgccagcaggaaaataacgtaggccgtttccccttccccccacgcaattccttgcggagccaaaagcgttaccaccacggtctttttagccaacaggccaagggagtgaggtaaagcgattccttcccccagcatggtggaaacgatagcttcccgctcgactaccgaagggtaaaaatccgcatcgacgaaaccttcaagctctagttgctggcaaactttgctgaacaactgcgcctgagtcagcggttcattaacccgcacaaaatggttttcatcaaagaacttttccaacatataaggccgggtgcgatcgactaaaaccagttttcctaattgctccagctgatattccgttggaaaaggcgacatcaccactaccggcctatttttttccgttaaacgcgcattggagataataaaatcttcggcaatagtcgctatattttcatattcccgtagagataccgtcctagttaccacgatttgaggatacttgcgggaaatttgcgcctgaatcatacgaatcgtcgaatttccagtatcacacaccagcatgacctgcggatgacgctcataaccaatattataatgccgctctaaccctaccccgatatgcagtactaaatagccaatttcattttcactcaggctgtaaggggaatacttcccccaactggaaaccgcagccagcgttacatcataggccattgggtaatgctgtttgatattagataacagtggattagggatagtgatctgatacttaacccgcgtaatcatcgtcttgatatgggtcagcaaatcgatgcgtaattgcttatcatcctgcaaattatagttatagtgagagttaatatacgaaaggatgtaatccaccagcgtttcttcatcgtccgcgtttatttcgctgggctggctggtactaggctcgctgatttccatccgccgtgcggcaatattcacccgaagataagcctcttctgccgctgaaatctctttgccagccaatagctgtaactcattggccaaacgtccggaagccagttttaccgcttcatctacatcttcagcatcaaaatcagatagcggatagccttcagcgatacgttttaccgccaccgcacagtaaaaaatcaggtactgctcaccttcatcagacaatcgcacggcgtattgagacaataattggtgcaataaatcggtcagcgccggcatcgccgcatcgctaagaaaaacattttttaacagtgggttgtcgctgtcctgaacatgcagctgaaacagtaaatcggtcaggcaggaacgaatggctagctcggtgccaaacagcttcataccatagcgaggcttagcctctatggtcagatggtaacttcccagacgctctctcacctcagccatatcactttgcagcgtaccacggcttacaaaccattcatcagccaaatcttccagcttcaatgcaaaggctgaggtcagaaagcgaataagcaaatactgaacccgctcggcggcggtacgcggcgtcaggttcgtcttaggcgtttgctgctgcaatacctgaaaacgttcggcatcatcgatcattaatcgataaccaaatccccgattatgaataaaacgcgcaccatagtgctcaagaatatcgttcagcgcagtaatatcagctcgtaccgttcgggtcgaaacggcaaagcgctttgccagttcatcctgcggcagagtttcagattgcagcgcatcgaacatataagccaaacgttgataaggaaatctcactgcgcctctccgctgatgtagggcatttctgccgaatacaggctgctcctatcgggaggaacagcctgccagtgctactcttttgccaatggcgtaaaaatcatttgcgatggactacctaccggaatgtaaccaggaataaagctcaattttccgctgctttgatccaccttgaaccgggttatgttatcgctacgttgattcattgcgtacaggtagtgaccaccgggatctaaaaccaacgtacgcgggtaatcaccacgcgtccatacctcctcaatggctttgagatccccctcgccatttactgcaaactgcccaatgctgttatgcaaacggtttgccacgtagaggaaacgcccatcttttgacagtgttaaacccgctgcaaaattggttccacgaaacgcttttggtagcgatgacacactaactacttgttccaaagtccctttctgagtgtccagacggtaactggtcagcgtagaggcctcttcattaatcagaaatagtgcttttccattcggatggaaaacaaaatgacgtgggccagcgcccgcagaagatgcactgatatagggcggttcatttggtgttaatgcacccgttgttggatcaaaatgccattgatagatccgatccagacccagatcggtggaaaaaacaaacttcccgctgggatcgcaggcgatcatatgagcatgagggccgttatgatcgctggcggcaaaactaccttcaaccgcagcagccggtttagccgctcccgctgggccttcatcttgatgaacagagctggccgcctctatttttccatccgtagccaaaggaaaaaccgccacagaaccactgacatagttcgccacaaataaatggctccccgaaggcgtcagagacaaataaaccggccccgcaccttgcgcatcaacctgatttaacagagttaagccgccgtcttgcggatcgacacggtaggctgcaattgaaccgtgtttaccgccgttgtaatccgatacctcactggcgacatacagcgtcttcccctgagcgtccgccactaactgagccggattcgccagttcactaaccagcgttttattctttaattcaccggatgcaggatcgagctgtagtcgataaacgccttggccgttcgggttataggtgccgacatacgcaaattgcttcaaattttccgctccgctagatttttctgccccataagaagatggatgaaatcctgccaatagagccaaagaaaggccaaccgcaagtaaacgcggcggaatgacattagacgcagggtatgtttcagagaggaatggcctgttacgcatatttttcccttatcactatgacgcgaccagggtatgggtctagctaacctaacatccagatttacaggtaaaaacagcctacaccacacccgataaagaatgaggcatctcagcgatgccccttctgaaagcttatgccacgattctttttactatgttcagcaacgtgataacgtcctgcgggcgtgtatcacccgtttcgctatcgataattgaactatagatatgaggaataattttgctgactccggcatcgagagcgatctgtaaaattgtctcaaaattctccagatcgatgccgcccgtcggctccagccaaaaatcatgtttggcgcaggcctcggccacacagcggtattcctcaatgtgttttaacccacccatcgggaaaaacttaatcgagctgccgcccatatctttcaacatggcaatggcggtttctaccggaacaatcccatccggcgcagcggcgctcagtgggccagtggatatcttcacgtatcccacttttccagtcggtgaaatcaatccattcactatggtttcccactgaccaagcagcgcccggcttgggcctacgccggtaaatacctgattaacatgctgtggctgcacctgttgagcaattaaactcaccatagcggattgatttgggtcccctgcgccaagccctactgacagcgcattgtctatccgttcagcatattcgcgcatatcgctgaccgcactttcaacgtccggatagtttttagataaaacaccaaccaaaacatgaccttcagccgcctgccaaatagcctgcgcgttggatttggaacccgctagcacattgaggcaaactcgatttcggtaataattaggggtcaatttcatcgattaatctccctgaaccaagcgttgaatgcaggtagaaatgacctcaagctgtgctgacgtgacactgcgcacgtccacctcaatcttgccttcatttgctttgtacgcgcggaaataaatcgccggatcgccgtccatcaaagctgcgaccaactctggcgttgaacgcccaattttgacttcgtcgaagctgatttcggttcgggcaatatcccggccggcactatcccataccactttggcggagataccgggcaaagcattcaaatgactgataaatggcgtcattttttcaaccatttgctggccggtggtctgttcctgttgaatatagctctcgatagcctgagtcaggccaataatgctttccttacccactttcatcgcccgaccaataccattcgactgtagcttaacccaatctacgtaggtctttttgcccaagactaacccgctggttggcccttcaattgccttcgcgccactataaatcactaaatcagcgcccatctgatagtagcaggccagatcttcttcggcggccgcgtctacaatcagtggcagttggtgcttacgcgcgaccacaactgcctgttcaactgacaaaatgcttttttgtacgcaatggtgggattttatatacaaaatcgccgcagtattcggcgtgatcgccgcttcaagctgatcggcagagcattcattggcatagcccgcttccaccactttaccgccaccgagggtcaccatcgtatccaccggggcgccgaaattaacgttgtgcccttttggcaacacgatctcatgggggacttgcaacaccgcagcttgcagattaaccaataaattggcgttatctttcacgataacggcagcaactgactgcgcaattcctgccgaagcgcaggaaacgaccaccgcactttccacattcagtcgctctgcaatataagcaccggttttattcaccagatctttaacttcgaagaagtgatttagcccgaatgcaacggcttcgaccacgtcctgccgcggtgtagaaacgcccaaaatcgtcatccgaccggatgcattaatcacgctttttagctggtacttttcatagatcgaagacatcgtgagatttcccttcgtcagttaacaccaagtcaccggcgacaaccgcagccaatggcagcaaatatttctctccggttacggatttaccttctgaatcgacaaatacttgaggccgttgtttcacttcgaatatagttaaatcggcatcaaagcctgcggctaatacccctttaccggtcaaacgtaatgcctgcgcggcattttctgttacgcagcgaataacttgttcgaggttaagaccaatggtaaagaatttagacatcaccgttgccaagctgtgcaccggcccggtaatacggttgcggcagtaaatatcagaactgatggtgtgagggtaaattccctgtttaatcgcctgctcagcaacatcgaaactaaaactggcgctgccgtgaccgacatccaataacacaccacgttttaatgcgcgttgaatagactcccgcagcgtaccggacggggtcaaaatacggttgggtttaccgttatagcagtgggtaataatgtccccttgggtcagcaaatcggcaatttcatctagatccggcggattattgccaatatgtaccatcaaaggtaattggttattttcttgctggatttctttggctcgaaccaaaggcttaatgccgtttttccccacgacgctactgctcatccgagccttaatcccaataataaagccgggattgcgagcgattgcctcgcttacgctggatttatcgatctgctccatatcggctaattcgttttgcgtcacaatgccggttttagcgatatttaaaaacgcgtaaacctgtgttttcgccgctcgcgtcaaggtataaaaatcatccacgtcattggcaccggtactccccgcgtcaataaccgtagtcacgccgctggccacgccaattaaatccgcatcatcatgataaattggcgaagctgggtagcaatgaacgtgtgaatcaatccagcctgcgctgacaaagtactgccccgccaaatctatggttgccttggcagaaagaaaatcgataggattttcattacagagtgaaactgaagtaatcttgccgtcatcaataacgatatcgacctgatgcccttcaaccaaccttgcccgtttgataataaagtcatgcattatctttattctccgttaaatatccgggtaacaagatgtgagtggctaaatgatgatggggcaaaattgatcatttaatttcgccccgtaatatcaagaaatagcgaccgggaatagagaacctaaaatcatcgcgcctaaaatcgcaccaccggtaattggcttgctccataaatagaacaataatgcgccagccaaagaaccaataccgataggaatagaagctgccattgcagaaagaataatcaagggtccaagaaaacgtccggatgaattacctgcgcccatcatgacatccgcgccgtaagttgaatcactctgattaatggtgaattttctagccagaataataagataaccgatagcaatgccaataactaacccagtgaccagtgaagctgcaaaattggctacggggaaaacaaatccagcgcccaataataatgcaggaacccccaaacctactccggtttgaatcgccccaccaatatccagaatacctaccagcgagccttcgataatgcgtgcgaataagaagctggcaccgaatgctgctactgcaccataaacgccggtatccatacctgctcgcaacatggaaacgaaagccacttcgttaaatgcgccaatcccatagagataatacatatgggtaccagcaaaaacgccggaagataatacgccaacaaatatcgggaatgaccagtcggcataccaaaaaccgtctttggtttgttcatccatcatcaagctcctgtagaaatgttatttaccgcttaatgcgttatgaatgctgtcgagccagactggaacgcccagactgaatgactccaggaatttcatgtcaaagccacggaagaaaccgctcaaaacaaacagtaagacaataactgccatcatgatttttgtgactttattccaaccgctttcttctacgcctttaccgattaaaatacccagaaccagacctggaacagcgttccccataattaactgagccagaccgccaaaaatagtggcccagaaaccggaacgacgaccggcatcaatagccgccagccagaaaataaccggcatcacggtattcaccagaatattagccgccggtaccaatactttaattgcggtaacctgcaatgcttccggtacagccgaagcggtggtatttaagaagctaacaacgataacgccaataatgccgcaggcaatcgccatttttttcgggttatgcatggtctcggccacattgcgatttttaatcatcaatgctgctgcaccccagttaggaataatgcgatggtcaacatcttgcgtaaacgcacccgccgcaacggaagacgcccatgcgttaaagaagaagcccaaaccaaaggagaaatgcgaggctggatcgccttcacaagagttcagttcacccaaggtacgaaatgcgcccatgccctgaaccgtaggcgcatgaaacattcgcgctgcaccggcaccgacgccgacaccaaccagtccgccgatgataatcgacttaaaaagaatgattaaaaacatcagtatatcctttcatttatagccaacgtttttatttagagacgaaaacaaccttatctgtattaatgattgttacgctcacggtaatatctaaggctacggtataagtcctcttttcgcggggaagaaagaagaacagaaatttctctttttttaccgactcttccgcgcttaataccttcacgtcctggggttcaatgcgtaataagatattttgtgtcgacttcaataccgtattctggacatgacctaatgcgctggcgaaagccttagctttagtatcccctttccctttgaccttaacctgggtggtatattgttctttcattacggattgccatgtttcttaatataagcttcaaccagtttctgaccgagttcttctttatccataaaaccaaaacctaatactttacaaccttcatttattgccgttacgccctcttcaatagagcgcattccgtatttcgctttatagccatatttagtttgtgccgtaatagcgcctgcgccaccgctgccgcaaaatgaaataccgaggtcagcctgttctttattcatcacatcgcccaatttcatatctgcggcaacgccaggaatcacaatagattttgccccggccaactcaataccctgaccgactttctgacctttacccaaacggtcgccaatcacaacggtaatttgactcataattttttctccaaggctgaatttatgaattattatctttggctacttcaaaatgcacggacaataaataggcttcctcaatgggcaaattccccaatgaatcgactacttgctgagccattctcattgaatctgctgatatttcgtcaaataatgacttatccacttccggcagtggttcaccagtaatagagcgcagcaccatagcccgaatatgtgaggtcaacatctgctgctgaacatcattggtataaatattctcggcattcagcatggccattatatccgccaataaccattgagttttctcaatgccatcatcgacatcgagtttattctcagtatttacagatacggctccatcattcacgctagcgttcctctgtactgtgctgatttattttctgactgcaaagaaaagttcatggcgttaaatcttattcctttcctttacgctatagccttaccctacccctaagcgtaaaaagtatgtagcctgtttttttccagttcgaagtggaaataaagtgagcaatattgatccaattcgcaaaatccgcggtactgggccttcccagtgaattttcacttttttaaagctagcgctatccataaatgtttataaacgataaaacagaaaaaaacgccgaagaaataacaggaaaatatcatgcaaaatcttagaacttgcgatgattcagctattttataagaagattaaatagggaaaacagggtaagagaataaatatccttattttatttcagcataaaaaatggcaattatggaaaataacgagatcaagatcaccttttatcaaaagataaagcaagaaaagcttcgtgatccggatctctttcttttctcgccagaagcgcctagtatcagactaataatctgatattttctaacaccccctctcctatggcgcgggggtgttgtttttatgttttctgtacttgaattggagagtggtatgaccaagccaaccatcacgattaacgagctggacgccgaacgtttggatgcgttgttggcacaacctgcttttgctgacacagcgattgccgatgcactgaatgaagagctggatcgcgctgacattctgcctccgtcagaaatacctgctgacgtagtcaccatgaatagccgggttcgttttcgtgatttgaataatcaggaagagcatattcgcacgctggtctaccccgcatcgctgaaagatagtaacgaacaaatctcggttatggctccgctcggcgccgcattactgggattacatgttgataatgagattaactggaaactgccgggtggggatgaagcccgcattaaggtattagaactgctgtatcaaccagaagccgccggtgaatatcaccgttaataccttcgcgttttagcgatgaagggtggtagatcgtcgatctctcacccttttatgcatcaagtgttaaatccatttacttctcaatactctttattccttaagcgcactcattatttagcctgactcattctttcaagctatagcatcttaacggtattttttatggtaagtgttgcgggtgtctttgaattcctgcgccacctttcgcgcctcttccagcttgccttgatcggctaaagccagagattgatcgatttgaccgatcagtatggttaatccatgacgataatcttgtacttctgcgctatctggcgccttgccctttaatttaggcggaatgcctttctgcgcatccaacgccgcgctgcgcatcccctgtaggccttgtttgaagctttccagcgaatcggttttcagaaccgcactgtaattgctcgcaatggtatccatatcttccgcaatatcatttgccattgccaaagtgctagcgcttagcagtatggcggccactaacacttttattttctgactcatgctcacgctccttataattattgttaatagtttgtatcactcataacataggtggctagcagggaaacaggcaatagaatttttgtaaaacactgaaaatttaatggtagcagcaatgagacataaaaatggccgagggcattagccatcgaccattttactacagatttttatgccacaatatttgaacccattcccgctaatcgagcgtgattaacgaaaaaaatccaaaggattattcaccagcaattttcatttctggaagtaatattgaaccgcactgaatattactgcgtgtttcaatatcactgcctgcgctaaccatattgcgcagcatgtctttaagattacctgcaatggtaatttcactgaccggatactgaatttcaccgttctccacccagaaaccggcggcaccgcgagaataatcaccggttacggtgcttacgccctgacccatcagttccgttactaccaggcctctgcccatcttcttaagcattccggcgaaatccagcccttgcccagcaatacgccagttatggattccgccagcatgaccggtgcttttcagacccagtttacgcgccgaatagctggtaagcaggtaggtttgcagaacgccgtctttcacaatttcgcgacgctgggtacgtaccccttcgctatcaaaaggcgtagaagccaacccgcccaacaggtgcggatgctcttcgatggtcagccattcaggcaaaatctgtttgccgagatgatcgagcaaaaaggtagatttgcgatatatattcccgccgctaatggctgaaaccaaatgcccaaacaggccggtagcgacttctgcagcaaataacaccggagccttcatagttggcagtttacgcggtgacaggcgagacagggtgcgacgagcgcactctgcgccgacccactctgggctggccagatcttccaaccggcggctgatgctgtaagcgtaatcacgctccatatcaccgtcaaactctgcaatcacgctactggatatcgaatggcgacttgagcaataacttttcagcataccgtggctgtttccgaaaaccttgatgccatagtgactgttaaaactaccgccttcggtattggtaatgcgcttatcggcctttaatgccgcctgctcggctctagctgccagttgaatgccgcgatcggcgtccaactccgcgggatggaacagatccaactccggcgcatcaaacgccagcaaggatttatctgccgggcctgcataaggatccggcgaagtatagcgagcgatatccaacgcagcctggacggtgcgggccactgcgtctggattcaaatcagtggtggacgcgctgcctttccgctgctggtgataaacggtaatccccagcgcaccatcgctgttgaactccacgttttccacctcgccaaagcgggtgctgacgctaatacccgtagttttagtaacggcgacttcggccgcatccgaactggcgcgagccagttccaaagcttgtgcaacagcttgttccagcgttttacgctgttctgcaacttgagtgactactttcatcgatctgccataattaatgagataatcgttcaggaaagtgccgtgacggcgtagtaatacgacgatttacacggataaaatgtagagcgccatggctttgagtctaacaggatctgcgtacaatttcgcagaaagccaacaacctgataggattagcctctttttaaggaatgacaccatgaacaaacagcccgaagactggctagacgaagtcccagaagataaaaatgaagatgatgatgagattatctgggtcagtaaaagtgaaattaaacgcgatgccgaagcgctgaaagatctgggcaccgagctggtagagctgggcaaaaacgcgctggaaaaaatcccgctggacgaagatctgctggctgccattgaactggcgcagaagatcaaaaaagaaggccgtcgccgccagatccaattgatcggtaaaatgctgcgcgcccgtgatgttgaacccattcagatcgcactggataagttaaaaaaccgccataatcagcaggtttcgctgttccataaactggaagtgctgcgcgaccgattggtagaggaaggtgatgacgcggtgcctaccgtgttggatctgtatcccgatgccgatcgccagcaactgcgtagtttgatccgtaatgcccagaaagaaaaggcagccaacaagccgccaaaagcattccgtcaaatcttccagtacctgcgtgaactttccgagaagcagctatgatcggacggagccgggagtctgccacagaccccggttccgactaacaaatattaaagcgtaaactgccagacaattcttcttccgcctcttcgaacagtagaataatcgcgccaaaacgccgtttccggcggtgattgagatgaataaactcaatttccaccggtaaactgatagctccggttaccgtatcccacaatgcatccagattggcgccgaaatcttcgcccaaagaaaacttctgcgaaaaatcgtgataaaatgcgggaagatccgcgatatggtcaaaatcaaacgtcactttcaccatcttctcactccacccgaacaaaattcttataatgatcctgagtcagataaatcaggccatcattggaatagagcagccgatccgttccccgatggccacactgatagttgacgtccgcttcacgccatatccgattattcgccttgggtaacgaaccttcacggtttgaaaaacgatcgccaccgatagctttccccggtaatacctggcataaattgccgtctttcggattccaaccttgctcacgcgcctgctttttcgtgatataaaaatccggcaaccggttgttttgttttaggtatttcaccactttttcatgctgggtcagttggtcgatagagtcagttcggctgactttattactctgctgatggctacgcgtctgctcctgactatcggcctgcgctatcaccggtgttgacgtcggcacagaggccggcgctgttccccgctcgtttccctgaatgaccgcgacaattaataccaccgccgccgccagaattcccaccagacgtttgttcatgattttccaaatcaatttgctcggctaaaaaagagagctgacgccgatgagcgccagcgcttttccgttgatttattggctataaattacctaaatgtaaggttttcacttccataaactcatccaaacccagcaccgaaccttcacgacccaaaccagattctttcacaccgccaaaaggcgctaattcagtagaaaccgaactatcgttaatgccgatcatgccgctttccagcgtctcggacacgcggaatactcttttcaaattttgagtatagaagtaagccgccagaccgaaaggtgtgttattcgcgcgctcaatcacctcttcttcggtcttgaaacggaagcaggctgccagcgggccaaaagtttcctcacttgctactttcatctcttcggtagcctcggcaatgacagtaggctggaagaagttgccacccaatgcgtgacgttcaccgcccgccagcagacgcccgcctttcgccaatgcgtccttgacgtgatcctcaactttttttacgccagcagagttgattagcggccccaggtttaccccttcatccatcccgttgccgactttaagttttttcacttcggcagccaaacgggtgacaaactgttcgtaaataccatcctgaatatagaagcgattgacgcagacgcaaacctgaccagcattgcggaatttgcaagccatagctccggcaactgccgcatccagatcggcatcgtcaaagacgatataaggcgcatttccccctaattccatcgagattttcttcatggtttctgcggcgttgcgcattagggttttgccaacctcggtggagccggtaaaggaaattttacgcactttcgggctggccataatgacatcgctgatggcgtgagtgtcgccagcaacgccatttaacacgccggccggcacaccggctttctctgccagagccagcagtgcgaaagcagaaagcggagtgttattggcaggtttaatcaaaccggtacagcccgcggctaacgcaggacccagcttgcgagttagcatcgccagcgggaagttccacggcgtaatcgctgcgactacgcccaccggttcacgagtggcaaagatacgcgcgccggtttttgccggaggaataatttcaccgttggcacgtttagcctgctcactaaaccactgaatgaagctggcggcataatctacttcacccaaagcttctttcaagggcttaccttgctctgcgaccattaattcggccagatactgacggttttcgacgataagctgataccagcgctgtagaatctcggcacgctgtttggccggcgttttacgccaggcagggaaagcctcatgggctgctttgatcgccgcctcggtttcacttttaccggctttagccacctgagccaccaattcacccgtggctgggttcaatacatcaaaggtttctgcggcctgataccattttccaccgacatagtagccagttttaaacaattcatgtttctgtaacggattatccagatgtgttgaagcggacatctttaggcctcctgatcggcaaagggctgcccacaataggcaacgaggaaggggggagcgtgagttgagtatagcccttgatggtggcaggaaaacaggctccctgccgccaatagcttattgaatgagcgcgtgctggtatctgtgcaacatatctgcaagacgtttgaccgtttgagtaacagagacaggagcatgatattcaaccagtttttgctggtaatcacttaattcctgtagcagacggaaaaagtagtggcgtcgcttttgctcgtttttcgacgtcatcacccgatcggcggtatggcgaatctgtttatggaaggcgcttaactcggcgttgactggaatctcggtattattcagcctttgatgagcgacaatcagcaacagagccaaacggtacttggcgatatcaccggggaacatcatcagcaattggttgagctgctgatataacgctggcaaatggttatcgctgcggcgggcttggttagtggtcagagccgccaccgcgctgtacacaaaacggttgagcaacgttctaccggtacgcactttagcgttatcacgaatcagcagcagcacgatcagagaaacaaaacagccgaccatctggccgagggcgctatccagaaacaggctaacgttgaattccatggggttgctgagcaccaaaatgttaatagtacccgccagcgtgcccaaggagcccagccgccgtttctgcacttccacgccgataataaatgccagtaaccccaagctaatgcataacagcagtaaactttgctgagtcgaaggcagaataaacatgaagtacagcgctcccatcggcaacgccattaacataccgatgagaaagtccatcgccaccatgcgcggattgggcgttcgcatcgccagagaggttacaaccgctatcatgaccatacagcccgcccccgatgtccagccggtccacaaccagaacaggccgccgatcgcagtagcaataccggtgcgtaggccattgatcatcgcgtgatggccctccgccgaggtgtgttttatttcaggctcggtggttaacagctcttcttcaacgctgctaatactgctgttggtatgaatgcccttcgccagcaacaaatagcgagtggcggcaccaacccagctactgatggtcaaaggcacggcactactgtgactacccgcgaaatgctgacgtaacactttcatttgcttatgaatatcgccgcagttatctgcgggtgtactcagtagcgctttcagttcatcggttagataatcaggatgattaatcaaaatcaaataggtttcacaggcctgagtaatcatagcgagggattggccgtgtaacgcctgtaagcggcgatcgcagcgctgccagcgtgaggattccatcatcagatagctacgcatccctttcaatgcactggtatttttcaccaaatcattccacgcacggtcgatatcttctttatccgcagagtggatgcacaaatgcagcaggtgatactgatccaccagcagtttatcgatcagtcgatcgatatcctgtttgatggatcgcggagaaaacagcagatccgcgatcaccgcacagacgatccccagcacaatctcgctacagcgttccaccgcaaactgcggcgttagcaacggcgtttctccggtagtcacaatgatgatcaatgcggtgtagccagctagaccgaaagcgtaggaattctcgactttcaccagcgaggaaatccaggtacagacaccagcccaaacacagcacagtattagcgtcagtaccggtgctcttatggtcagaacgataatgatcaggccaccaatacagccaatgaatgtgccaataatccgcagccagccgcggtgacgaatagcgccggaaaaaggttcgccaccggcagcaaaggctggtccagcagcaacaatcgccgccgtcatcaccgaccaacgcggagtttccaactgaaaatggaagcccagaaacagcgccgctataatggcaaagctcagtttgaacgcaaagcgatagcggataaacctttggctagtgaacatacttccccttagccgaactcacgcaggcgatgcattagctgaatcaaacccgaagcatggcttggctcgcgaccattcggcccggtaatcactacggtggcagtggtgcccgcaggatacggatgctgttgatcttcctcatctaaacgaacttttaccggcacacgctgagctaaacgaacccattccagattattatcgatcgtcgccagccccttactatcggccttgctgctgctgttagtcacccctgcggatacgctatcgacggtgccgtgcataatacgatgactacccaacggggtgatttcgacgcgatcccctctgcgtacaccttccagcttggtttcttccagataggccagtacgtaaaacgtgtcttttttcactagcgctaccgcagtagcgcctcgggtaataaattcaccagcatgaacattcaagttagtgacccaaccctgagctggcgcacgcaccgtggttctttccaaatcgagttttgccagatcgcgcaccgcgatggcttttgccagttggtgtctgacggtttgcaacacgttggtggactgatcgatttcttcctgtgacaaagcctgcacccctaaacgcagacgacggctggactcacgctgtttctccgccgctaatgtttgatagtaggccacatcggcttcggcactggccaacgcctgctcgtaacggggacgatcgataacaaacaatacctgacctttttctaccaattggttatccaccaccggcacatcggtaattaaaccgctgacgtcgggcgcgatggcgaccacgtcggcggtaaatttggcatcacgagtccagggggattcggtataaaacgcccagattttaaaaatggccattacggccagcagtaccacaaccaaggtgataccgattcggattatttttatcagaaatgtactcacggtaacctcaggaaaagaaacgagacgttaaataaaaaaggcaacagaacagcgccgtattaaacaaagccgggtgccagacaaattcataaatacccgtcggctgtaaaacccgacgcagcagaaaaaacagcgccagagaaatcagcaactcgagaaatatcggtggaaaagacagaccgaaaacaaccatcaccggaagcaaactcattcttttatccttattttttgggtaccggttggtttaccctaccgctggatttataccgtcgagtgaaaggtcaccgttcgctcgaccgatcgcggcactaacctgaaataactatcaggtgcctgaagtgttaaacttgctggtatctgtcagaggaaggtgcgaggacaactgaggcggtgcgtattaacaccgaaggttatttctcccgaccccttatattagcctgcttattatcaactgatctacaatctgtgatctaaatcacttttaagccagagttaacaattcattcagagagaacaatggaacgattaaaacggatgtcggtttttgccaaagtcgtcgagtgtggttcctttaccgccgccgcccggcagttaggcatcagcgtttcttccatcagccagaccgtatccaaactggaaaatgagctacaggtcaaactgcttaaccgcagcacgcgtagcattgggctgaccgaagcgggtcgtatctattatcagggctgtcgccgcatgctacaggaagtgcaggaagtgcatgagcagctctatgcttttaataatacgccaaccggcacattacgcattggctgctcctcaaccatggcacaaaacgtgctggcaaccatgaccgcagatatgctgaaagcttatcctggcctatcggtcaatttggttaccgggattccggctccggatctgatctccgacgggctggatgtggtgatccgcgttggggctttgcaggactcaggcctattctctcgtcgtctgggatcgatgccgatggtggtttgcgccgcaaaaagctatctggctcaacacggtacgccggagaaacccgcggatatggcgaatttttcctggctggaatacagcgttcgccctgatagcaacttcgaactgaccgcaccggagggaatttccacccagatatcgccgcagggacgttttgtcaccaatgattcgcaaaccatgattcgttggctcaaagccggagccggtatcgcctatgcgccgctgatgtgggttattgatgaaattaaacggggagatgtggaagtgctgttcaaccgctaccattcagaaccacgaccggtttacgctttgtataccgaaaaagacaaaatgccgctgaaagtgcaggtatgtattgattatttgacggaatacttcaagcgcgtggctgaaatttatcaaggataccgctgagtaaatctggcctccacaagcgaggaggccagcgaaaatcaggccgtgccgccgacggtcagattatccagtttcagcgtcggctggccgacacccactggcagactctgcccttctttaccacacacgcccacgcctttatccagcgccagatcgttgccaaccatcgaaatttgctgcatcgcctcaatgcccgaaccaatcagcgtggcacctttcaccgcgttggtgattcggccattttcgatcatgtaggcttccgaggtagaaaacacaaacttaccggaagtgatatcaacctgcccaccgccaaaattcggcgcatacagaccgtattccacgctagcgatgatgtcttccggcgtggatttaccagccagcatgtaagtattggtcatacgtggcattggtaaatgcgcgtaagactcacgacggccgttgccggtcggcgcgacacccatcaaacgtgcgttcagcttatcctgcatgtagcctttcagaatgccgttttcaatcaatacgttgtattgacccggaacgccttcgtcatcgatagccagtgagccacggcggccttgcagagtgccgtcatccaccacagtgcatagctctgaggccacgagctgccccatttgaccgctgaataccgagctgccacgacggttgaaatcgccttctagaccgtgaccaaccgcttcgtgcagcagcacgcccggccagcctgcgcccaatacaaccggcatagcgccagccggagccgccacagcgaacagattcaccaaagccatacgaacagcttctttggcataggcgtcggcacggacatccccatcaaccggttctaagaaatagtcatagccgaaacgaccgccgccgccgctggcaccgcgttcacgtttgccgttgtcttccaccagcacactgacagacaaacgcaccagaggccgcacatcggcggccagcgtgccatctgtagccgcaaccagaatcaattcatatacgccggtcagactggcgctcacttcctgcacccgcgcatctgcggcgcgcgccactttatcgacccgatgcaatagcgcgattttttcttcacgcggcaagctttgcagcggatcgagcagaggatacagcgaagcgtgggcaatctcgcccaaggtgtgaactttaccgttcccattatcacgcacaatactgcgggcagcctgcgcactttggtgtaaagcattcagggtaatttggtcggcataggcaaaaccggtcttttcaccgctgaccgcacgcacgccaaccccttgatcgatattgtaagagccatctttgatgatgctgtcttccaacacccatgcctcgtgatagctggactggaaatataaatccgcataatccaggcggcgttcagccaactgacccagaactgaggaaagatcctgatgggtcagtttgttagcagcgagtaactgctcactgacaaacgagaggctcatattattttcactctttattggatgaaacttcattgaatggcggcaccagacttggctggaagcgattatgctgcatcaccggcatctgcttacgtattttttgcaggccattagcctcgaccctcactttcagggcagaaacgttatctggattctcgattaataccttgccccaagcgtcaacggccatcgaatgaccccaggttcgacgggttaacccatggctgccaacctgtgccggcgccaatatcatacattggttctcaatagcccgcgcccgcagtaacacttcccagtgagcttcaccggtaacccgggtaaatgccgccggaacggaaataatttccgccccttgcgcgcgcaacgcctggaataacccagggaaacgcaaatcgtaacaaatggtcatgcccaaacgcccaaccggcgtatcgactacggttagatgctctcccggctgataggtatcagactcacgatagtgtccgtgtgtatcattgatatccacatcgaacatatgaattttgtcgtagcgcgcctgcaattcaccctgatcgtcaaacagcaggctgctcgtggtaatgcgatccggagactcacggctaatcatcggcatcgagccaaccagcagccagacgccgtaacggcgcgccatttcacggatggcctgctgtaacgggccatcattgtgacgctcggcctgtttacgataagccgcagaatcggcaaataacagcgcattttctggcgtcatcaccaatttaatgcccgaattcaactgcttaatctgttgctctatctgagctaggttagaacgggtttgctcaccgctacaaagctgtaaaagtgcaacattggcatttttcatggtgccttattctcctttagctggcgtaacacctcatggatatccggctgatccagactaccggttatctgatatcgaatcagagatattttactccacaacggcccgagcactttggtggccgcaaaaaccgccgccccaatcaccgggttaatcacaaatgccgtagccacaccgacggtcgcggatatttccggcgtaataacggcttccatgttgatttggcgtttcaccaaatcaacactgccgttcatggcgatatctgccgccagaccgtcgatcaaaagatcgttagtatgcaccacgccagatttcacgctggcggtgccgcgaatcgaatcaaaggcaaagtcacggctgaaggtatcgctgaaatccagctgtagtttacgcaacaatgcgtcgaagctgaccagccgcagcagttgcccggcgcggcctccgcccagattcaccatggcacctttgcttagtttggcgctcaaattgccattaagggtttcaattcgcggctgccaaggcacgccctgccacgccagcgttgcgttgccgtcaaaaggtgcatctttgagcggcgtgctaataccgaagaatgacagagtgtcatcgattttactgccagaaaccttcatcctaaccgacgtgttattgccttccgcactttgctgccattcgccgttaaccgccatgtgagccttagcgacctcaatcaggccattcttaagacttaacactttgttgttatgggagatatcggcgctcactttgccaatattctgccccataacccagcattcttgacagcgaagctgcaacgctggccaatcgcggaacgaaacatcatgacttagtggagaatcttgcaacgccgcttttgacaaaggtttatcaacatcttgcgccgtccactgcgggttgtagtagagatagcgaatatctgcccgccacggcccgctgctggctacgcgcacgctgccatccacttcgcgccctttggcgctaatatttgtcccattcagctgcggctcaatccgcagggtcagattatgccaagcctggccgcccagcagcagttctggcgtttgtagctcaatgcgagaaggtaatgtgaactggctctggctggcagattttttaccgatcatggatgacgcctgcggagaggctgatgctagcgcagggccaattagcgccagccaacgttccccatccaaagggggcaaattcaccaccaaccctttttcagcaggtaatggcgggacttttttgctgtcggtttgccagaccgctttactcaattcgactttctgatcttttaacaaccattgactgttaaaatgattcgttcctgccgctgaaccagaaagcgtgaatccattgaggccacctttggcctgaacgctcaccggcaaagattcaccgccttgagtatctagcggcggcggtaagcgactgctcactttctttaggtctgcgttgacatctaccagataacttggctccccgtgcttcggcaactgcaccgcaactttgccctgccaaccgaagctacccttcagctgtttggctatttcagcgggaatctcggtgattttggctggaatccagtcaccgcgcaggttaaccccaacctgaaagttgtctttttgctcttccgtggtgaaatttaccgtcagcggctgaccaaaccagttagccgatatttcatcgctcgacagattgccatcgctaaagcggaatttaccgctgacattttccaactgactttgcagtggcttaatcaataaactgttgttgtgcagcgtcacttcaccggtagcgtgcgtgatattgccttctaccaagggaatatccagatgtaagcgcccacttacacccccaccaacctggagttcatccaatgcactccccacggaatcatgtagcggcgtatcgttaaagtaatcatgaacatccgagcctagccccgctacctgcgcatcaacaaacaggcgttctttcagataatcaggaatattggcgctgatattggtgccggtgacgttccccagcattgcccgcggtgcattcatccacaggccgtcattgaggaaattcaggtcgatagccagattttccagcgctggccattccggttggaactggaaggtcgcattacgcaacggaacataaacctggaattgaccctcgttatgggtataagggaaataatgtggattaccgttatagaccaacgtggcgttatccacctgcccgccctgaatcgcgccggtcagataatccaccaacgctttccccatcaaaggctgagggaagtaacgccaggcatctgcgccgtcatacaggcggataccggccagaatattcagccacggctggcctttttccggctgttgataacggaaactaccgtttgcccacaaagacttggcttttacatccagcttatcgctccacagctcccagcctttatcatccatgcgccagtcaatgtcgccctgagcgctgctgacttccagcggtgcgccaaacatgtcaccgtaaggcaaaatgctgtcgtgcagatttaccgccagacgcccatggctgacggaaccgctcaatgtgccagagaaatgattcacgcccggtaagagttcccaatgctgccagctgacatcttgccatttagcctgaaaacgggtcaattctggctgttttagaggaatatccagcgccagcgcattcaaatgcccctgcggttttaaatctccccaacgggccagtaaatccggggtaaacaaagaaatggtcggtaacagcggcccaattcgctctaactgaaggtctttggcacgaaggcgtaattcttccggctgatccgggcccagcagtttattattttccggcaaccacagcgccgacaggctcccttgcggccacgcctggccgtcagtggttaaattcagctgtggggcatcaatctgccagccatttccctgacgacgcgcgtccactaccagttgatcgacagcgagctgatggggttcaccttgagtagtccaagcggcttgcccttgttttagcagcacattcccactgtaaatatcgccgcctttgagcgtcagccaagctgccagactaaattcggcgctgtctaatccggtattattatgcaaccagcggctgatccaaggcttcacgtcaatattatcagcctgcatatatacagtgccgttattcagaatgccctgatcgtcgtgtaaatccatccgtacctgaaccacgccgtgctggccattaatcgtcgataggctgatctgcccttcggcgcgatggcggttacgcgagttaagccaggttaactgaggaatttccagctcggcgctggaaccagaaggggtaagaaatgaaatgcggctgttacgcagatcgaaatgatccaactgacgcagaaaaatatcggtgaagtggctggattcaaaagaacggttctgatcacccggattaatcagcggacgatccaaatccagctgtagctgatggaacgtcatatcccgtagctgccagcgccagtgcagcaaagattgccagacatccagcgctagcgtgatgcgctgaacctgcaatttggtatcaggcaactgggcgcgcagatcccgtacttccagcgtcgggccaaaagtttcccaactgccttgaataaaaccaatttccagcggaattccgctgacggcctgaatcttagcctgtagctgcgcacgatagtcgttgagctgcggcaacatcaaacgaagcccactcaccaacaatgccaccacaacaatcattgtggcgcctgtcgctaacaaaatcctgggcagtcgcctcacgcatctctccttgcttcccgctgcaaggggcgcagcggaaatttattacatcatcaccacgtcaaactgctcttggctgtagagcggttcaatttgaacttttacctgcttaccgacgaaaatttccacttcggccagcgcatgggattcttcgctcttcagcgcttcccctaccgcaggtgaggcatagaccaggaatctgtcggtatcataggcatggtgaacccgcacgatttctcgcaggatttcatagcataccgtttcgacggatttgaccgtgccgcgaccgtgacaagtaggacaatcattacacagcacgtgctcaatactttcgcgggtgcgcttgcgggtcatctccactaatcctagctgagagaaaccgttaatactggttttcactcgatctttgctcagcgcctgctctaatgagtgtaatacacggcgacggtgctcttcattactcatatcaataaaatcaatgatgattatcccaccgaggttacgcattcgcagctggcgagcaatggcctgagtggcttcgatattagtattgaaaatggtttcatcgaggttacggtggccgacaaatgccccagtgttgatatcgatggtggtcatagcttcagtttggtcgataatcaggtaaccaccagatttcaattcaactttacgctccagagaacgttgaatctcgttttctacatcatacagatcgaaaataggttgtttgccggaatagtgctccagcttattggtcatttctggaatatattcgcgggtaaattcgatcagttgctcataggtctggcgggaatcgacccgaatgcgatccaaggccgcgcccgcaaaatcccgtagaattcgctgcgccagagccatttcgccgtacagtttgcatttagttttatcacgttttttacgcagctgtactttggcccacagacgttttaaaaacgccgcgtccgcggataactcttcttcaccaataccttcggcggcggtacggataataaatccgccctgctcatcgcaatagctggccactgtatttttcagacgatcgcgctcagcttcgctttcaatacgctgagacacaccaacgtgcgccgctccgggcatcaacaccagataacgagaaggcagcgtgatatccgtagtcaggcgcgcgcctttggtgcccagcggatctttgaccacctgcaccatgagatcctgcccctgacgtaccagttcagcgatatcacgtacattgaaattcttttgctcatccccagccacgcattcggtgtggggcataatgtctgaagcatgaaggaaagccgccttatccaggcctatatcgacaaaagccgcctgcattccaggcaaaacccggctaacgcgacctttgtaaatgttaccgacgatgcctcttttcgcttcacgctcaatgtgaatttcctgcaggatgccaccgtcgatgtaggcaacccgcgtttcagacggtgtaatattgaccagtaattcagctgtcatgtattcctctcacatcacgtagcgcgaaaaaatgactcagtagttcatgggtttctaccaacggcaggccgacaacggcgtgataactgcctttaatcgccctgacgaaacaaccacccttgccctgaataccgtaagcgcccgctttgtccatcggttcaccggtagcaatatagtcactgatttcttgttgagataacacgcggaatgtcacatctgtcacgaccattgtgccgagtaaatcctgtttatcggctaatgcaacggcggtcatcacctgatgctgctgcccggacaacgcacccaacatttgcgcggcatgaacagcatctcgcggtttttccaaaacctgtccattaagcaccacaatggtatcggcaccgagtaccggtaaatcccactcggcaaccgccactccggcgcgcgctttatcttcagccaaacgtcggacatagtcctcggcggcttcccccggattacgctgttcctccacttccgttttcagtatttcaaacggtaaatcgagaagcgcgagcagttcacgccgacggggagaacctgaggccagataaagggctgtcattggaaaaatccttattgcaccgcaaacttacggcgaatcttacgcattaataagaatagccacggccataagataccgttaattaaactactccagaaaacttcaggtcggaacgaaacgttaatcactaagaattctgaccagaacaccacaacatccatcgttagcgacagaagcatcacgattaatgcctgctgccacagcgccatattgcggaataactgaaacttaaaggccaccagataggcaatgatgctcaatgccaacgcacgcacgccaagagttgaacctaaaatcagatccaaaatcaggccgagaataaagccgctgccaacgttaacccgatgaggcaatgccataacccagtaaatcaggatcaacgtcagccatgacgggcggaacatataaatttcttttggccacggcatcacctgtagcaccattgcaatcaggaatgatagccagataacccagcgcccattactggtgtaacggttcatggcgtcgcccttaccgctggcgcgttcgccggaggcggattcaaactggctggtgccggtgggccgaccatttcgctggcgcttggcaatacctgaggcatcatctgcatcagacgctcattagccacccgatgtacttcattcggcggcaacggcaaatcgccattgcgatccgcgccccacagcaacagcaaataacgcagacgctgtaaatcggccattggacgagcctgaataacggtataggcgcgctgattatcgactttaaccgaagaaaccaccgccaccggataaccttctgggaaacgtccaccgaggccagatgtcaccaaaacatcaccaacacgaatatcagtattgcttggcaaatgttcgagcaataagtcgtcgctacagccgccaccggcagcaataacgcgaatgtcattacgcaagacttgaatcggtagcgcgtgggacgcatcgcatatcaacagcacgcggctggtgaatttgctgaccgccactacctgcccgaccacgcctttatcactgatcaccggctggccttcatacacgccattatcggtgcccttatcgatcaccacctgatcgctataaggatcggtgccgctggaaataacctgcgtcaccattttttgttcgtcctgacgcagcggagagccgagtaactcgcgcagacgtgagttttcctgcttaaactggccaagcaactgtagatcggtatttttaagcaacagttcctgacgtaacgcacgattttccagctcaagctgttggcgcgttgcgatggtttctgaaacgctgtctaaaactttacgtggcccattggccagaaaatagaaggggctaactgcggtgtccatataggtacgaattttaacgaacgtaccgagccggctatcgacaataaccagcgcaatggctgcaagaacggcgaagaaaagtcgcagttgcagggatggaccccggctaaaaatcggcttcataaattatgcgtattcctcgacaacaaaaaggaggcactaaacctgatgatgcaataccttcatccgatccagccctccttttttggctgactattcttcgctgaacaaatcgccgccatgcatgtcgatcatttccaacgctttgccaccgccgcgagctacgcaggtcagagggtcttctgcaaccacaaccggaatgcctgtttcttccattaacaaacgatccagattacgcagcaatgcgccgccgccggttaacaccatgccgcgttcggagatatcggaggccaattctggtggacactgttccagagcaaccataaccgcgctaacgatgccggtcagtggctcttgcagagcttccagaatctcgttggaattcagagtaaagccgcgcggaacaccttctgccaggttacggccacggacttcgatttccagcacttcatcacccggatacgccgagccgatgctgtgcttgatacgttcagccgttgcttcaccgatcagagagccatagttacgacgcacataattaatgatcgcttcatcaaagcggtcaccaccgatgcgtacagaagaggagtaaaccacaccgttcagtgagatcaccgccacttccgtagtaccgccaccgatatccacaaccattgaaccggttgcctcggaaaccggcaggccagcaccgattgcagccgccattggctcttcaatcaggaacacttcgcgagcaccggcaccctgggctgattcacgaattgcacgacgttctacctgggtagcaccgactggcacacacaccaatacgcgcggacttgggcgcataaagctgttgctatgaacctgtttgataaaatgctgaagcattttttcggtcacgaagaaatcggcgataacgccgtctttcatcgggcgaatcgcggcgatattgccaggagtacgccccagcatctgcttggcatcatgacccacagctgcaacgcttttgggggaaccggcacgatcctggcgaatagcaaccaccgagggttcattcagtacgatgccttgtccttttacataaatcagggtattggcggtacccaagtcgatggacaagtcgttggaaaacatgccacgaaatttcttaaacataacgaaaggataatcctgcaagctgggggcgaaaaataaaatccgcctactttaccaaccacacggagcagcgacaaggcgcaaaaacgtcctactccggtgaaaaagtggctacgttattccaatcaagttccgctgaataaggtatatgcactaaaacccttgaataaaggctcattataccccccagtcgacgcgtcgaacggtgtaacacagcacataaaatctaacatttaacctgatttaccgccggaagtaagtgcctaccaacggtctacggaaatggctgggacattctacgttaatttttgctcaacgatcaggctaaacatggccctgttacgaatattttttctgctctgggttcaaaagcatcggcgcagcaaaaaaattgccctgtccgccataaacccctttctgtagcagcgtttcccattcttccctggtcaccacttctgcggcaaaaactttaacattcgtaccggcacaggcaccagtaagactttgcacaaatagctgattttcaaggcggacatcaatacttcttaccaatcccggatgtaacttaatcatttccacccgtaaagacttaatatatgaggtactgaccaccgtcaatccggcctgcgaaaccatcaatctacaacctaaccctaacaacaatcgaatcacagggcgtagggcctcaatatgttggcagacatccgcctcagccagctcaaagataatccgctgacggtaacttttccggcactgtaataaggtatcccgtagccaacgcttaaaggaacgttgcaataatgaatcaacgcttatggaaaatgccagcgtttcatccggccacagcgccaacaaaggaattatccgacctattttctgtcgatcataacgttcggccaacccgagcaaacgtaccaacggagtaaactccgccgctatcagctcttgttcgccatcaaatatccggctgatgatttcacggtgatgaatttttccatcacaggtaatgaccggtttctgatacaacctagggccaccgttaaccagcgttttttccagcaatgttcgccacttaacgctaccgcgtcctttctccggcacctgattgtcatagacataccagctattgcctccatacaacgccgcatttttggtagcttgtccagcattatccataatttgttccgccgcctgcccgtggcgataggccacgataccaatattgagcaaagcgtcgcgatcgataatctgcggcgctggcatggcacccgccacatgaaccaactgtgccgccatcacatcggcgtctttcagagttttatgcggtaataaaatggcaaaatcgctgttggcgtagtgagctagcagtgcggaaggataacggtcgacaaaagtggaaagcagattcaccatcgaatgcatcaattcctgcacccgtgatttgtcgtaaacctcacttaacgcatcaaaatcgggtaagtgcaccatcatcactacgccgtgggcaccgggttcttcaagctgggtagtcagctgattatcaaaaaacagcgcgttattcaggccggttttagcgtcctgtgcggcataggagcgaatcaaagtatccaattggctgcgttcttcacgcatttccgccaaatccagcagcaaacggtcgagagcatggctggcataaggcggccactcatgagtttcaccgcgcagtacattctcacgctcgccgttgagaatacgtcgcgctcggttctccagttgctcctcacctgccgtttgttcccgcagccagcgaaaacttaaaaacagaatgaccgcaatcatcgccaccgccaacgacaaaatcaccgctgcatacattgaacgagtgtaactggtgagcggatcgatataagtcaggcgcatcgaactgccgggctgctgtaataatggaagagacagttcgcgatagccgctattggtatcccaggcggtataagtaggaaggactttcagataaaacaattgatgctgcgaattttcaacgctgatttcaaccacgccaatagcgcccatcatcaacggcaaccagctacgcggaacttcaggtggatcggttagtaaggattgatcgtacgcggtcacgatagtattaaggcgatgttccatttttttctggcataagtagaaaaaactgaacgtactccctaacaacattaaacacatggccaatacgaccagtaatgccataaacgcagaaagtttggttgtaaatcgcatccctcagccttgcctaccgcagttaaatggaaagtattcctcactcctttagggcaggtactatatgataaaaccgaccacggacgctggttttttaatgttttatacgacaaaaacgcaattttttacgaaattcgcatccattgcctcatccttaccctgcataaagcatagtcactgatataagcatcgaggccaaatttgtcctcggtcagccttcgaacttgatgtttccggtatagtcacccaacctgatgaatacgaaattttcgatcgttattagtcgatcgttcgttattagtcgatcattgttaacggcacttcttagggagcctctaatgcgcgcactgttactcgaacagcacgatggcaaaaccttggccaacgtccgtgatatttcaccggaacaactgcctgcgggtgaagtcacggttgatgtcagttggtctagcctgaactacaaagatgcactggcgatcaccggtaaaggcaaaatcattcgtcagttccctatggtgccaggcattgatttcgccggaaccgttcacagcagcgaagatccgcgttttcacattggccagcgggtattgctgaccggctggggcgtaggcgaaaaccattggggcgggctggcagaacaggcgcgagtacagggtgaatggctggttccgctccccgcaggtttggatgcgcgcaaagcgatgattatcggtaccgccggtttcactgcgatgctgtgcgtgatggcgctggaagaaggcggagtcacaccagaaagcggcgaaattgtggtgaccggtgccagcggcggcgtgggcagtactgcgattgctctgctttcagctctgggctatcaggtagccgctatcagtggccgtgaagcgaataacgactatttactgtcactcggagccaaacgggttctgccgcgtagcgatttcagcgatgcatctcgtccgttggaaaaacagctatgggctggcgctattgataccgtcggcgacactttactagccaaggtgctggcacagatgaactataactctaccgtcgccgcctgcggtctggccgggggttataaactgccaaccacggtaatgccttttatcctgcgcaacgtgcgtttacaaggtgtagattctgtcatgacaccgcaaccgcgccgtcgggctgcctgggagcgtctgttgaaaacgttgccagaaagcttctatcaacaggctggacgtgaaattacgctagaacaggctcctgcggtagcagccgaactgatggaaaatcaggttactggccgaaccttggttaaagttcgctaattagcccattaaaatagagtcatttcattgggcggatgtttcgttcgcccaatctcagaaatttcatattttctgctaacctctcgcttttacagccttttcacaccatgctttattccattacggtcagtatgactttctctgcccgatggagtaatcacatgagcaaacaacgcaaattaaccgaatctgacgtcacgccggaaagcgtgttttatcaacgccgtaaggtgctgcaagcgctgggtattaccgccgccagtctggcattgccggtttcggctcaggctgacctactgtcttggtttaaaggtaaagatcagcccaaggcaccggcaggcaagccgctcaccttcagtaagccaccagcctatcatcctgactgggaactgacgccggaagacaaagtgactggctacaacaacttctacgaattcggtctggataaagctgacccggccgctaacgccggtggattaaaaaccggcgattggcagattcgtatcgatggtgacgtcgccaaaccaatgacgttgagcatcgacgatttgctcaaacgcttcccgctggaagaacgcatttatcgtatgcgctgcgtggaagcctggtcgatggtggtgccttggatcggtttcgagctaggaaaactgctaaagctagtcgaacccaccagcaacgcgcgctatgtggcattccaaaccttgtacgatccggatcagatgccgggacagaaagatcgctttgtgggcggcgggttgaaatatccctatgtagaaggtttgcgattagatgaagcgatgcatccgctggcctttatgacactgggcgtgtacggcaaaacgttaccaccacagaacggcgcgccgctgcgtctgatcacgccgtggaaatacggttttaaaggcattaaatctatcgttcatattcgactcactcgcgaacagccgccaacgacctggaatctcagcgcgccgaacgagtacggtttctacgctaacgtgaatcccaatgtggatcatccgcgctggtcgcaggctaccgaacgctttatcggttccggcgggattttagacgttaagcgccagccaaccctgctatttaacggctatgccgatcaggtggcttcgctatatcgcggcatggatttgcgggagaatttttaatgcgtctgagcctgaaacaggtcaaagggttgaaagtagcaatctggctggccgcctcattgcccttcttctggctaattttatccgtcgatcagggctggttcagcgccgatccgtccaaagacattcagcattttaccgggcgcatgactctcaagctgctgctggccaccctgttggtgacaccgctggctcgctatggcaagcagccgttgctgatgcgctgtcgccgcctgttgggagtatggtgttttgcctggggaaccctgcatttagccagttattcagtgctagagctggggctgtccaatatcggtttgctggggaaagaattagttacccgcccctatttaactttaggtattattagctggctattactgttcgcactagcagttacatcgacacagtgggcacagagaaaaatgggacctaactggcaaaaattgcataatttcgtttatctcatcgccatcctggcaccgattcactatctttggtcggtcaaaactttatcacccttgccgataatttacgcaatcgcagcaattattttgttagcactgcgttataaaaaatttcgccaatggtgccgctaaatgctgggacttcaccctcttctaccccagataatccgttaggctttgtatagttcaccatgtttcttattgaatatcttcgctgataagaccagtatttagctgctaattgctacgatatcattataatgctccaccttagttccgatcgtagtgggaatttcaccgttaacaggtgacaaatcggtggcatcaggctatttttgacgatgacgaactaattgccggagataccagcataatggcggacaagtttcacattttgcttctgaacggcccgaatttaaatctgcttggctctcgcgagccagaaaagtatggttacaccacgctggcagagattgttaacgggttggagacacaggctcagaatttgggtgttgcgttatcccatctgcaatccaatgcagaacatgcgctgatagacagaattcatcaggcacggggcaacactgatttcatcctgattaacccggcggcgtttacgcataccagtgtcgctttacgcgatgctctgttaggcgttcagatcccgtttatcgagatccatctgtctaacgtgcatgctcgggagcctttccgtcaccattcatatctctccgatattgcggttggcgtgatctgcggactcggcgcagacggctacaactttgctttacaggcagcggtcaatcgcttgtcaaaatccaattaattgcaacgcaaaagagtacggaatcacactcatggatattcgtaaaatcaagaaactgatcgaactggtagaagaatctggcatttccgagctggagatttcagaaggtgaagaatcagtacgtatcagtcgtgctacagccgcaccaagctacccaatgatgcaacagccttatgcttttgccgcgccacagcagccagcattggctaacgctgtagcaccggcaccggctgctgaagccgctgcacccgcagccatcagtggtcacatcgtgcgctccccaatggtcggtactttctaccgcaccccgagcccagatgctaaagccttcatcgaagtaggtcagaaagtttctgctggtgataccctttgcatcgttgaagcgatgaaaatgatgaaccaaatcgaggcagacaaatccggtactatcaaggccattctggtcgagaacggtcaaccggttgaattcgacgagcctcttgtcgtcatcgaataacgaggcgttccatgcttgataaaatcgttatcgctaaccgcggtgagatcgcgctacgtattctgcgagcttgtaaagagctgggcatcaaaaccgtagccgttcactcctctgcggatcgcgatctgaaacacgttctgttggctgacgaaaccgtgtgtatcggtccggcagcgtcagtcaaaagctatctgaacattcctgcaatcatttcagcagcagaaatcaccggcgcggtggctattcaccctggttatggtttcctgtccgaaaacgcagactttgccgagcaggtagagcgttcaggtttcatctttatcggtcctcgcgccgaaaccattcgtctgatgggcgacaaggtttccgcaatcagcgccatgaagaaagccggtgtaccttgtgtgccgggttctgacggcccgctgagcgacgacaccacgcaaaacaaagctttcgccaaacgcatcggttatccggtgatcatcaaggcgtccggcggcggcggcggtcgtggtatgcgcgtagtgcgcaacgacaaagatctggaagaatccattaacatgactcgtgcggaagccaaagcggctttcaacaacgacatggtttacatggaaaaataccttgagaatccgcgccatatcgaaattcagattttggcagacggtcaaggtaacgcgatttatctggctgaacgcgactgctctatgcagcgtcgtcaccagaaagtggttgaagaagcgccagcaccgggcatcaccagcgaaatgcgtcgttatatcggcgaacgctgtgcaaaagcctgtgtggaaatcggctaccgcggcgcaggtacttttgagttcctgtatgaaaacggcgagttctatttcatcgaaatgaacacccgtattcaggttgagcatccggttaccgaaatgattaccggcgtcgatttgatcaaagaacagctacgcatcgcggcaggccagcctctctccattaaacaggatgaagtgaaggttcacggccatgcggtcgagtgtcgtatcaacgctgaagatccaaataccttcctgccaagtccgggtaaaattacccgtttccatgcgccgggtggctttggtgttcgttgggaatctcatatctacgctggctataccgtgcctccgtactacgattccatgatcggcaaactgatcacttacggtgaaaaccgtgacgtggcaatttcccgcatgaaaaatgctctggcagagctgatcatcgatggcatcaaaaccaacgttgaactgcaacagcgcattatgaatgacgaaaacttccagcacggtggcaccaatatccactatctggagaaaaaacttgggttgcaagaaacctgattttatttcgcctgaaaatcaaggccggttaataccggccttttttattttctgatcaaacagggctaggcaaacgccgcgcttgccgtaaaatcccctacccttgttaaactcagaaccgtcaatacccacgggagaatgaatggacacgagatttgttcaagcccacaaagaagcgcgctgggcctttggtctgactctggcctatctggcaggctggttattgtgcgcctattttcctggcgatgtgccggggatgaccgggttacccgcctggtttgaaatggcctgtctggccctgccactgctatttattgtgctgtgctggctgatggttcgctttatattccgcgatattccgctggaggacagtgatgcaaactgatgtcgtcctgccattagttgcctatctggcattggtttttggcctttctatttacgcatacacccggcgacagaccggtaatttcctcaacgaatacttcatcggcaaccgttcgatgggagggttcgtattggcgatgactctgaccgccacctatattagcgccagttcatttatcggcgggccgggagctgcttataaatacggcctcggctgggtattactggcgatgattcagttgccagcggtgtggctgtcgctaggcgtactgggtaagaagtttgcgattctggcgcgtcgttataacgccgtaactctgaatgacatgctgtacgcacgctatcaaagtcgtttactggtgtggctggccagcctgagcctgttagtcgcctttgtcggtgccatgacggtgcagtttatcggcggagcgcgtttactggaaaccgctgcgggtattccctacgatactgggctgctgatctttggcgttagtatcgcgctctatacctccttcggaggtttccgcgccagcgtattgaatgatgcgctgcaagggctggtgatgctggtaggaaccattttactgctggttgcggtggttcacgccgccggcggcctgcataaggcggtcgatacgctacaacacatcgatccggcgctggtttccccgcaaggtggcgacggtatcctcgatttgccgtttatggcgtcattctggattctggtgtgcttcggcgtcattggcctgccacatacagcagtacgttgcatttcctatcgagatagcaaagcggttcaccgtggcattattctgggcactattgtggtggcgattttgatgtttggtatgcatttggctggcgcattgggccgggcgatcctgccagatctgaaaattccggatcaggttattcctacgctaatgatcactgtgctaccgccgttcgccgcagggatcttcctcgccgcgcctatggcggccattatgtcgaccatcaatgctcagctattgcagtcttccgcgactatcgtcaaagatttgtacctgaatttccgtccggaacagatcaaaaacgagcgtaagctggctcgtatttccagcatggccacgctggttctcggcctgctgctattgctggcagcctggcgtccgccggaaatgattatctggctgaatttactagcctttggcggtctggaagcggtattcctctggccgctggttctggggctgtattgggaacgcgctaacgctcacggtgctcttagctcaatgatcgtcggtgcggtatgctatacgctacttgccagtttcgacattaagatcgccggattgcacccgatcgtgccgtcacttgtgctgaacttgctggcgttttatatcggtaaccggtttggcgacagagcgcgggcgcgacagcctgtcgtcgccaacgctgaataaatcgctatttaacggtattatttaccgaaaccttattgacaaaaaccggtccaaaaacgcaagttgcggagcggttttagaagagaaaagctatgccttggatccaattaaagttaaacacttccggtaatcaggccgaatccctcggggacgcgctggttgagagtggcgcagtatccgtcaccttccaggatacccacgataatccggtatttgagccgctgccgggggaaacccgtctgtggggcgatactgatgtgattggcctgtacgatgccgaaaccgatatggctgaagtgatcgctgtgctggaatacaacccgcagttaggcaaaggcttcgcccacaaaattgaacaactggaagacaaagattgggaacgtgagtggatggataatttccacccaatgcgctttggcgagcgcctgtggatttgcccaagctggcgcgatgtgccagatccaaccgccgttaacgtgatgctcgatcccggtttggccttcggtaccggtactcatcccaccacctctctttgtctacaatggctagacgggctggatttggaaggtaaaactatcatcgatttcggctgtggctccggcattctggccattgcggctctgaagctgggtgccagccgcgctatcggcattgatatcgatccgcaggccattcaggccagccgcgataatgcgcagcgtaatggcgtttcagagcgtctggaactgtatctgccgaaagaccagccgacggatctgtctgccgacgtcgttgtcgccaatattctggctggcccactgcgcgaactggctccgttgattagcgtgctgccgaaagtcggcggtcatttgggtctgtctggcgtactggcgactcaggctgccagcgttgctcaggcttatgaagataaattcgcgctggacccagtggcagagaaagaagaatggtgccgcattaccggcgtcagaaaataatccccacgctatttatccccgcttacggcctcactacgccgctggcggggttatttcccccgtcgtcatacccaagcccgccttttacacttaatcgctgtgtgagctttctgctgcgttaacatgtctttgttgcagctgatagcgacgcgtcatgttttttcctcaaagtgagagctttctcacaggatttatggggttattactgtggtttaacgcagttttgcttactaaatcagcagtatcgatcggtgttaaaagaagtttccagtcaataatcagggtgtttagcagaaaatattgtcgtacataaaacaaccaataatttataactgcatgtttaatatgaataaataattattattacaagattagctggctatttattgctatttttaagccaattggtcaaagtttggcctttcatctgaacgtaaaaatgcgtaatatacgcgcccttgcggacacagtatggtcattctttgtctatgcacattggacacttccagcttaaaaattgcctgattgccgccccgatggccggtataacagaccgacccttcagagccttatgtcatgcgatgggggctgggatggctgtatctgaaatgctctcctccaatccggaggtgtggcggacggataagtcgcgtctacgcatggtccatagcgatgagcccggtattcgtaccgtgcagatagccggttgcgatccggatgatatggcagcggccgccagaattaatgtggcgggcggcgctcagatcattgacatcaatatggggtgcccggccaagaaagtgaaccgtaagctggcaggatctgcattgttgcagtatcccgatctggttaaacagatcctctccgcagtcgttaatgcggtagatgtgcctgtcacgctgaaaattcggactggttgggctccggaacaccgtaactgtatagagattgcccaattggccgaaagttgtggtatacaagccctgacaattcatggccgaacccgtgcttgcctgtttaatggtgaagcggagtacgacagcattcgggcagttaagcagagtgtttccattccgattatcgcgaatggcgacataactgacccgcataaagccagagcggtacttgattacactggggctgacgccctgatgataggccgtgccgctcaggggagaccctggatcttccgggaaatccagcattatctggacactggggaactgctgccaccgatgccacttggcgaagtgcagcgtttgttaaacgggcatatacgggaattgcacgacttttatggtccaggcaagggattccgtattgcacgtaagcacgtatcctggtatctccaggagcacgccccaaacgaccagtttcggcgcacattcaacgccattgaggatgccagcgaacagctggaggcgttggaggcatatttcgaaaatcttgcgtaaacagaaaaaagagctgacagaactatgttcgaacaacgcgtaaattctgacgtactgaccgttgcaaccgtaaactcacaagatcaggtgactcaaaagcctctgcgtgactcggttaaacaagcactgaagaactattttgctcaactgaatggtcaagatgtaagtgacctgtatgagttggtactggctgaagttgaacagccattgttggacatggtgatgcaatacacccgtggcaaccaaacccgtgctgccctgatgatgggcatcaaccgcggtacgctgcgtaaaaaattaaaaaaatacggcatgaactgatactagtcagttaggttgttgtttaaaaaggcgtactccacacggagaacgccttttttattgcctgtaaactgcccgctgttctgagataaggagaacaacctcgcaaaaaacaaatgattccttcactaattaaatggtcaatcatacttatacaatcacaacccttcgtagtaaggtattttttagaaaaagttatcgcaatgttctgattttattatttaaattggtaaatatcatgtattctttgtcgtccccgcccatcgggcaacctgatagtgctgtatcaatcttatcgattcactcaatcacttttcagtcattcaataagtttctggttattaacgagctatattaattacagcccaaattctgcctatagcgcggactatcgaatataaggtagatactataaataataacgccggtggttggactattaatgaatcgctgaaggcctgtgaattacctgcaaatatcaaaacaggttttgctggcgtgactaaaaacctggttggagcggaatgcgttccggtattatatgctgccaagcagagaggcaacggtaccaaccctacgctgatttgtgtgcaacccctttcagaaaaaggcacgagcaaacatcttgtgacatttatccttcaggaatccttggataaaaagtcagcagcgccctatcacgcctatcgttaaataattcagtttattgatggagttaaataatggagttaaataatgcaggtaaataacagagataaataatagagataaataatagagataaatagtcatttttatattttcaatttgattaccgcaactaaatacacccgcccctcgacaattatttttgtcggaatggctgcttattttatttattaatgaaaaatcactgcaacgacagtctcttagcaaatcagacaacgtcatcctaaatatcctgcaatgggtagaacagaacgttatttccccttgagtttgattaattaatctctttatttcactcaggagatatatgttatacttgcccaaagagccgcttctcgcctgccaactgcctccgattgagacccgaaacaccgcgcgatccccgcttttaatgtaaagattctgtcaattattggtttgatgaaaacgataagcgacaactggtgtcttaaataatgtaccgctaacgagttatttccttatgcgttacacattcgctcctaacgcataatgattgagttaacatgataaaaccccaaaagttccagctttcgctgcttcatcctcgctattggctaacctggtttggtctcggcgtcctatttttactggttcagttaccttacccactgctgcaaaagctcggcgtgtggctgggccggacttcaatgcgttttctgaaacgccgcgtctccattgcccgccgcaatctggaactgtgtttcccggatatggataagcaagtgctggaacgcaccattgtcggcaactttgaatccctgggcatggggctgatggaaaccggaatggcctggttctggcctgattcgcgggttaaacgctggttcaccgtttcaggcctgaatcacctgaagaaagcgcaggaaggcaaccgaggcgtgctggttatcggcgtacactttatgtcgctggaactcggcggccgcgtgatgggccaatgccagccgatgatggcgatgtatcgtccgcacaacaacaaagcaatggaatttgtacagacctggggtcgtatgcgttcgaataaagcgatgttggatcgtaaagatctgcgcggcatggtacatgcattgaaaaaaggcgaagccgtctggtttgcacctgatcaggactacggcccgcgcggtagcgtatttgccccgttctttgccgtcaatcaggccgcgactaccagcggtactttcatgctggctcgtctggccaaaccggcgctgttacctttggtgctactacgcaaacccgatggcagtggttatgacctgctgattcagccagcgctagaagattatccgattgacgatgagcaagccgccgcctgttatatgaataaggtgctggaaaaagagatcttgcgtgcgccagagcaatatctatggctgcatcgccgctttaaaacccgcccagcgggtgcgccttcgctgtattagcaccatctgaatagcaaaaaaccggcggagccggttttttattgtctgaagaacgccaaatcgcggctacttcgccgttttatcttctacgcgatagtccgaaagcgatgagaacgtgcgggttgcttcatccagcacatcaatagaaccggtttcaatatcataaacccaaccgtgtaagcgcaaacgcccctgcgctgtcgccaatgccaccgacgggtgagttttaatattcgccagctgcgcaatcacgttctcacgtaccagagaattcagccgatctttgggtgaaacatgcggcaacgcggcattgaccagcttggccgaatccgcatgacgcaaccaggctgcgaccgcaggcagatgatccaaacactgacactcggcaatcgcgctcatggcaccacagtttgaatgcccgcaaattaccacatcggtaacgcccagcactgccacagcatattctaccgtcgcggaaacaccgcccggctcaggcccgtaagaaggcacaatatttccggcattacgaatgacaaacagctctcccggctcccgttgagtcagcagttccggcaccacgcggctatcagagcaagtcacaaacagcgcgccgggactctgtgtatcggccagctgtttaaatagctcagaacgctgtggaaacacttctcgttggaacttcagaaaaccgtcaataatatcttgcatcatatctctcctcgcccgttcaacgctggcccacgccagcacgctggcaagttttgtcgcttaccataataaatatcctatcagcggcgcgcctattacggtaataattccagccaacatcatgactaggctagcgactaccccttcctgttgccccatttcataagctttggccgttcctgcaccgtgggaagaggcgcccaaaccggcaccttttgctaaaccgctacgcaccgatagccgcagaaacagcaaatcgcctaccgccataccgaatacgccggtaatcaccacaaacagtgcgaccaaatcgggctgtccacccaactgtttcgccgcttccagcgcaaagggcgtggtgatagagcgcaccgccagactgcgctgcacctcttccgagagcgtcagcagcttcgctagccataccgaactggctaccgcaacggtaatcgcagttatcactcctgcgctgagagaaagccagtggcgacgaataatcgacagattctcatacaccggtaccgcaaaggcgatagtggctggaccaagtagccataacaaccaatgggtttctccaatataatcctgataggaaatatgagtaaccaccagcaataacaccaaaatcatgggtgtcagcacgagtggcatgagcagcaaggaacagcgacgaagatagagtttcttattggcaaaataaagccccagcgtcgccaaaaagcacaggatactgataataaagtcattcatgatgagctgatttacgccgctgtagccagatttcaaaccgatagactcgatcgaccactaacccggtagcggccagtgtcagcatggtactcacggcgataacggcaaaaatcttccaaccctcaaccattaatagctgggaataattcaccacggctaccaccgccggaacaaagaacagcagcatttctgccaataaccagcgagaaccggctttaacccagcccatcggcataatgcgtaatacgatcagcgtcagtagcaacaacatacctacgatattggctggcagtggcaaatggaaaacccgaactaattgatcggcaatcacaaagagcccaacgtataacgccacttgaaccggcacctgtatgcgttggaggaaagacggcgcaaaactgcgtaacgccaatgacatgagtgaaccccaatgggaaagattttacagcatccagtataggcgcgcggaaagcttgccaaaaatgaattaaaattatcttaatcatgccaaattggcatacttagggtgatgctcaagctaccagccaatttttggggaatacagatggatatccgtaccttacgctactttgtcgaggtcgtacgccagcagagcttcactcgcgccgcagagaagctgtttgtcactcaaccaactatcagcaaaatgctgcgcaatctggaagaagagctggaatgcagtctgttgattcgcgaaggtcgccgcctgcatttaaccgatagcggtcaggccgtttatcagcgcggtgtcgccattttggatcagtttcagcagttagaagccgagctggaagatattggttcgctgaaaaaaggccgcctgcgcctgggcataccgccgatggtcggcacccaaatggcggtattaatcagcgaatttcgccaaagttaccccggtgtagaactccgtattgccgaattcggcggcctgaccgtccagcaggcagtgctttccggcgagctggatttagcgcttaccgccctgcccgccaatgccgatttgcctctgacttcattaccattattcagccatccactgtgcgtggtggtgccgcgcacgcccttttggctgaaccgaaccaccattagtattcccgaattggcagaacagtcgatcctgatttataacgaggatttcgcgctttatcgccagttgatggacgcattctccgctaacggattttcaccgaaaattgccgttcgcagcggtcaatgggattttctggctgcgatggtgcaggccaatatcggcattgccattttgccggagcctatctgtcagcggttggataagagtacgttactgtggcttccgctggaacctttactcccttggcaactggggctgatttggcgccagggcagctatttgtcccacagcgcgcaggcgtggattgcccgttgtcgagaattctggcccaacggctcgttattaggaaaaaaacgggagagttaatgcgaggctgagtgacgggagaaacgagcggagcctgacgactccgctcattaagggaattaaccttctttttctatcagcaaggcttccagcaaatccaaatcgtgcagtagcttttgcagcgtttcgttgctaattttctgcgtcgcgcgcaaatggtaaagctcgccgcgttctgcccgtaacgcggttaaacggaagcgacgctccagattctctatcagcaaggtattttcgatttcgtctttactgccagtgcgccgccgcaaagtcccgattacccgcgaactgacctccttcagcaattgctcgtcaatattctcttccgtactggccgccagacgttcttccatcttattcaggctaacaatagccacttcggccattgcggccttggcggcgcgaatttcttcacggctgacgcttttatccccaaccacgacgccgcgtagcaacagcggcaaggcaattacccccataatcagcgagaagagaatgacaccggttgcgataaataccagttggtaacgcgatgggaacgcggtgccatcgctcagtaataacggaatggacaacacaccggccagcgtaatcgccccacgcacgccagcaaatgaggcgacccataactcacgggtggtgtactcactaaacaacagcgggcgttttttcatgactcgcttactgatgcgtttcatcagccacagccagctaaaacgcagcatcagcagcgccacatagataatggcgacgtcggcaaacaggttccaggtttgaatagttggatccagctcggcctgtagaatcgaggtttccagaatccccggcagttgcagacccaacatgataaacaccatgccgttgaagacgaattccagcatcgaccatacgctatccgcgcgcaggcgcattgccaaaggcgcattacgaatgacgccggactgactgatggtcatccccgcagcaaccgccgccagaatccccgatacgccaatatgttcagcaatcaaataagaggcaaacggcagtaatagcaggaaaacgatttgcgtcgctggatcgtcaccgctccagcggctcataatacgcagcgatttactgtacagccaggttacggccacaccggccaacagcccgccaatcgccactttcaggaactctagcgtagcgccagaaacgctgaagatcatggtgcccatcgccacggcaatagcaaacttcaacgccaccagaccagaggcatcgttcatcaaggcttcgccttccagcacgcccatgatggattttggaatgcgccctttgcccacaataccggacagcgccacggcatcggttggcgaaagcacggcagccagcgcgaaggcggcaaccagcggaatccccggaaccatccaatagatcaaatagccaacgccaacgaccgtaaccagtaccaacgccaaggccagaccgaaaatctcccgaccgtgatgaataaactcgcgggtaggcgttttccaaccgtcggcaaacagcaacggaggaataaacagcaccaggaatagctcgggatcgaaattaacgtgcaacccaaagtggggccaggcgagcaaagcaccacaaacgatttgcatcagagggagagggatttgaaacggcaacatccgggtgacaacacctgagagtgataccaccaaaatcaggatgaggattgtaaaaaagatttccatgctttccttagactcaacgcgacttaagttctgatcttacccacactcttcaaggggcggggggcctgataggtgatagtagatcacttttttcttcgcggggaaaaaacctgttactgacagcagcaaaagcataaacagcggggagtttgactaaaaatagcggtaaggagaggcgattaccgctccttaccagccagatgaaacagttaaatcagatagcccagccgccggcatagaatgccaccagcgcgatggcaataatcacggtgccgatattcagcttacgccattcgccagagaaaatacggccaatcaccagagagctgaagcccagcataatgccggtaacgatgttgcaagtcagtacgataaacaccgcacacagcaggccagacatcgcatcaacaaagtcgctgaaatccagtttggctacgttgctcaacattaataaaccgacgtacatcagagccggtgccgtagcgtagccaggaaccagataagacagcggagacaggaacagaatcagcaggaataaaataccgactaccgttgccgtcaaacctgttttgccacccgcagcggtacctgccgcagattcgatatacaccgccgccggagccgcgccgaccaaaccggcaaaaatgctgctcaccgagtcagacgtcaaagctttaccgccgttgataatctgcccgtctttatccaacagattagcctgccccgccaccgcccgaatcgtaccggtggcgtcaaacaccgccgtcatcaccagcgccagtacgcttggcaacaccacgggctgcaaagcccccataatatccagactgaaaatcagcgagtcgccgttggcatcagccagacttggcatcgcaaacagaccttggtaagtcacgcttggatcaaaaatcaagccaatgattgaaatggcgataatcaccagcagaatgccacctggcacccgcagtttctccagaccaaaaatcaccgccagacccaataacgtcatgatcaccgggaaagaggtgaaagcgcccaacgccacaggcaaaccttccagcgggtttttaatgaccagaccgacaccgttggcagcaatcagcagtaaaaacaggccaataccaatccctgtaccgtgagcgacgcccatcggcaaattacgcagaatccaggaacgaatgcccgttaccgaaataatggtgaacagtacccccatcaggaataccgcgcctaaagccacgggaatactgatgtgttgaccgagaaccagactgaacgcggtaaaagcggtcagagagatggcgcagccaatggccatcggcaagttcgcccataaacccattaacagagagccaagcccggccaccagacaggttgcgacaaatactgccgtcggcggaaaaccggctttgcctaacatggctggcacaactatgaccgagtaaaccatggccaaaaaggttgtcagaccggccagaacttcttggcgcacattggtattgcgttcgctcagtttaaaaaatgcatccaacgcgcctttcggctttataccgtcgttcgcttgaggattggtgctagacatggttatgtcccctgtgtgtcaacaaatagcctgcacgcggttccgacaaaatcgctttcattactgagcatccatcgagctatttccccgaaatagtcacgctggaaagaaaagcaaacgattagctggctgcgcgcataaccgaaaaaaagtaaggtttattcaaggcaaacgattatctagccatccatagtgactaatcaacaccagatagcgacatttaatgcattttatgacattaaatagccattctcagaaatgtgcgggggatctcatccatagaacgccatttttatgtcgttaaaattgggcaaaagcctgggtgagaataataacgaaaatgccaaacggcacgagcggggaataatctggatcaccggtttccacaaagttcggccaaagccgccaaggggaaaccggttttttatcactggctgacgaaacggctctagcgaaccagttcgaatttaccgccacgctctaccgcacgttggtatgctggccggcggtgaatccgcgccagaaaatcttgcagtttcgggtagcgggatagcccttttcctgcatcgatagcctcaatggggaaactcatctgcacatctgccgcactaaaatctttgccagcaaaccacttattggtactcaagtgctgttccagataatccagatgcgtggcgatctgcttatccaaataatttttctgcactcctttgccgattgctcccgccaccggacgcagtaaccacggcatcggcgggtgtcccagacgaccaaagatcaacttcatcactaacggcggcatcagtgaaccttcggcataatgcatccagtaacgatattgttggcggtcgtaatgatccgtcggcttgaattcaccttgagcatcatatgtttcctgcaaatactcaataatggctcccgactccgccaaagtcatatctccatcggtaatcaccggcgcttttcccagcgggtgaacctttttcaactcacgcggagccagcaggcttcccgcatcacgctgatagcgttttaggtcatagggtacttgcagctcttccagcatccataagatacgctgagagcgagaattattcagatgatgaactatgaccataagaaaactccagagtagaaaagcagagatcggaaaaactgagtatagccgaggataatcgccaacttttattaccttgctaatcagctgataaaagattgttcagccagtcggccataaaggaacgccacaggccaatattccgcttcaatgttatatcagagagcatcgctttgcggtaaacggattcgccatgagaataaataggcgttggcgatattttacttagaggaaggaagatcgataaactcttgctcaatcaggtatttcttgtcacttagcatggttagcgcgccctgaagcgttgctgatatcccaaccagatcacgccattccaccagactgtttttccagatatatttccaccctttcttgcctttgatgtaggttaactggagtagctcaatctgcaccttatctaccgaagcggctgataaataaatgcgccgacctttcagttcataaatcagtttagccctaagcccagccgacaaatccgcattaaagctggcgcaaaacgatgccagtatcccttcaagatcatctaattcctccataccgctaatcatccgcactccccttgcttaacctgcatgattgaaagcctgtttgcatcctatccttgatgttattgaactcccggtcttcatcggtcctatcaagatagggatcctgaatacacccgagatgatgttggcctgttgttatctctatagtggttatgtcagccagagccgcctgagggtgttatcattgctcaaaacttatcatgacatccagcccgataaatggagtccagcgaccaatgactgacgattttaaccgcaccgccaaggtattatccgtatttgactttgacggcacgctgacacaccacgatagttttatcccttttttgcagtttgctttcggcaaaagatactttgtccgtcgtctggtaaaactggtattacctaccattaagtgtcttcgacgagaacttacgcgggatgagctgaaagaagtgctgatcaaaacctacctgaccgaggttgaggatacatgggtccggcaaaaagccgaagagttctgttctctttactggagcaaattaatgcgccctgccgggctgctggcagtagccacggaagtgaactccggagccgaagtcacgctatgttccgcttcaccggcaatggtactgcaaccttttgccgacaaactcggcgttaaacttatcggtactcagcttgaggtaaaagacggtttactgaccgggcgcatcagcggccataactgtcgctgcgcgcagaagatcaaacgtctggaaagtgtgtatggaaatctggctgattatcacctgagagcctggggagacacccgaggcgattacgagctgctggccgccgctcaggagccgcactggcggcatttccatccagtctggtctaaaaagaaatctcgactggcgaaattacgccagaccagcttaaacccgccgcatcagtaatagctcatacctatcagataatgcgtaatgcgccccgactcaggggcgcccaaaattatagaatgcgctcagcaacagcggcatcgtgccagtccttaaactcctctaggagcaggtcataaagccggtcttcttttaacgtggcaaagttatcgatagcaaagaaatgggtgttatccatccgacgctcagtaaagctatccaacttttccagaattccgtaatttgtcccccccagcccaacgaacttccaaaaaatcgggtaattggccgagcgtcgtatggcattcttgatttctcgggttttactgatcccaccgtcagtaataaaaaccacatacaccggcagctcactgcttttaaagaaatcgacaatttcttccattaccggtggctcattgttgacgccgcccaatccaggcaaattctcccacgtcgtacgtttagatgtattttgaatagaatcaatataaccatcgagattatctagcgtgacatccggatatttacggtgccgctcagcaaatccccaaacatccatcgagccatcgtcgtcaaactgtacggctaataccgcgatacgatctagcactgcctggacatttcctcgattaaattgccccttcatcgaacctgatgcatccagcacaaaagccacttttgcttgcactgattgtagtttgtatttattcaggctaacgacggcattttttgccagattgaccaaacgaggcgctttttgttcgagctttttctccaggcttactgttggcgttgaggttgaggttgaggttgaacgagctggcggtggtgtcgttgcgatatcaacgccaaaattgatcgccagcggttccagcccaccgttgaatccttgcccaagtgctcgcagcttccaatgtccgctatatctgtatatctccgccacgatcagtgctttttcgctacgcccggaggtttctacagtaaataaagctacattgtcagtctctgtctcagcggaaaaatgtagttgttgaaggctggcaatggagtcctgcccatcaataaccaatgtaatggcgaccttgctgatttcggcatcaatcttggaaagatccaacgtgattacgctgttttgcgctgcactttgtaaagtcagactcccatccgccgctaccggatgattgaaaaagaaaaaatcatcatctcctctcacttttccgctggcggtcaataaaaaggctgaggtatcaacctcgcttcggaaagaaggagttgttgggtaagaaagtgtcagtttgagtgagttctgagttaacgcgatgttctggccagcctgaagatgcatatctaaagtccttggttccatatcaaactacagtggtcattttcctattatttacgggttttactcataaaaaaccccggtaatcaccggggttttttatcactgcggaaattagacgtttacgccgtgctgggaggccagcgcagataaaccgccagcaaaaccctggcctaccgctttgaatttccactcggcaccgtgacggtacagttcgccgaagaccatcgccgtttcggtagaagcgtcttcagacaaatcgaaacgagcaatttcagcgccagaatcgttgttgtaaacacgcatgaagctgttgctcaccataccaaagttttgtttacgaccttcggcatcgtaaatagtgacggcaaagaccagtttcttcacgtcagccggaactttggccagatcgattttaacctgctcatcatcgccgtcgccttcaccggtgcggttgtcgccctgatgttcaacggaagcacaagggctgagtttgttattgaagaaaatgaagtgagcgtcagacagcactttaccgtcttcaccgaccataaatacggatgcatccagatcgaatccctgaccgtcggtcacacgagaatcccaacccaggccaaccatagcgatgttcatggtgggtgcttctttagtcagggatacgttgccgcctttaacgagagaaactgccattttaaagctcctgcttataattggattattgggcaacgacttgctgcccaagtattaaacggtggcgattagaacgcgttaataccgtactgtgcgcagacggaagccagaccgccagcgtaaccctgacctactgcacggaatttccactctgcgccgtgacggtacagttcgccgaacagcatagcggtttcggtggaagcatcttcggttagatcgtaacgagcaacttgagtctggttgtcatcattgaccaaacggataaatgcgccagaaacctgaccaaagttctgacggcgagtttgtgcgtcatgaatagtgactacgaagacaattttgtctacgtcagctggaatatgatccagcttgattttcagggattcatcatcgccatcgccttcaccggtacggttatcaccggtgtgaaccaccgaaccatcggcagatttcaggttgttatagaaaatgaagtctgcgtcgccgcgtacttttccgtttgcagccagcagaaatgctgatgcatcaaggtcgaaatcctgaccatcggtagaacgtgcatcccaacccagtccaatcaggacattcttcatggttggagccgctttgctcagggagacattaccgcctttagataaagaaacgctcatgtgagtaacctcttgagttgatatttttcgaattcaaattcaggaatcggggatcagttccccttttcttcctcagggtccggtttgccagggaacattacgctggcaatgatacctaccgccagcacacccagaaccacaaacagactcgtggtggctgaaatgttgtaaccgtggtgccaaatgtgatctgttgcattcaaacccagtttcgcggcgatgaagaacagcaacgcaacaacggccttttcgaggtgaaccagatattgtttcaatgcttccaaaacaaaatacagcgtacgcagacccaaaatagcgaacatcatggcgctgtaaacaatcagaggctcgcggctgacggcaataattgccggtacggaatcgaaggcaaacatcacgtcagacagctcgactaccgcaacacacagcatcagcggggttgcgtacagtgcggctttggttccacgccctacggtaacgtcctgattttccggcttcgccagttcttcatcaacttctttctgattcagcaagaaagcatgacctttcaacttcggccaaatcgggaagaagcgttttaccatgcgataagccagatgctgcgaataatcttcaatttcatcgctttcgccgccgcttctcagcatcatcaccgctgtccaggccacaatcagcgcaaacacgatttcaacataaggcccaaggctcaatagcccggtaccgatagcgacgaaaatgccacggaagaagattgccccgataatcccccaatagagaacccggtgacggtaacggtccggcaccgagaaccaggagaagatcgccatcatgacgaacaggttatcgaccgagaggactttctccaacgcataacccgtaacgaacaggctggcaacttccgcgccgtgatgaagatataggaagccggcaaacaccatcgccacaaagatccagaaaatagaccataaagcggcgcttttcagcgaaataggcttgtcatggcggtgcatgaacaggtcgataaaaatggctcccacagacaaagcaataaagacaatgactgtttcagttgggaagccgatatgcgtggataccatatataacccttaccaaatacttatattcagaggccgaattcagcaggctcaaagcccagtgcgacggcgatttcacgaactgcctgttgttcattctggtcaaagtcaccgtcacttttcgcgacggcaatcccgactcgaatcgccaactgagcggcttcaggctgatctttcagagcaagaatgtgcttcatggtttcccctttgccaatttcgagatcgaaatcgaagctggaaaccagtttgttaaagaattcaataacctcagaggtatcaaacacacttaactcatcggatgcgcgcagaaaaccaatcatcttctgtttttcttccgcgctaacgccgtcgctggaaaccgcaatacgtgcacacacggccacggtaccttgcatgaattttttatttttgaagcgactaacctgcttagtcagctccgcacgacccgtattgaatgcgcctttaactttgttgaaaaaactcattctgtattccttattattgtctgaaattactttgaacccgctttccaacggaatccccagccaagcgctttatccatatcgctgtggtctttaaagaactggttgatacgttcaactttgatcgttccctgctcgttgaccaaccgggcaatggcacacatgttgcggctgtttttcccctcggtcatacgcgtttctatcggcggttgatctggaatatggatagtgacgacgccgtcggtattatcccagctcgcgacaccttcgtagataaaggcgaaaaccaatacctgacgaatattcttccattcccgaccgttgatatgcagccattcgccctctgatacatccccggtacgatcgtcgccctgcaattgcacgaaaggttcctgatggtacgaaccaaagccgttccccaaagcctgaaccaccgacttatggccatcatccaactcgacgaaagcgcctaaatccagatcaacacctttcttcgcgctaaacatgctgcgcaggccggaggaagagctgccgcgatgccagttcaggttaatgcggatttcgccaaagttgtcacgcttcgcgaggcttatcgctggtttatctttggtgagggaaactttgctcaggttgatcttagccggagcgggcgtgggtgctggagccggaatcggcgcaggtgcaggtgcaggagtatccgcaatatcgacgccaaaatgctcagccaatggcttaagaccgccgttgaagccctgcgcgatgaagcggaatttccattcgccgttacggcgatacagttcgcccagaatcaaagcggcttcctgacggccagtcagttctacgttgccgcagatcagcacgtcgtttccatcctcaacctgcaccgacaaacgttgcagaccagaaacggtctgattgccatcgcaggtcaccgtaaacgccactttctcaacgtctgaacgcaatcgcgtgacatccacggtaaacagagtgtcgttgccttgagcaaccaaactaacggtgttgtcgttattaacaggctgaccgtaaaacaccatatcggcgtcaccctgcacttttccgttggcaaacagccgaaatgcagaggcatcgacgggtgcgccggataacactcttaccgtcaatgacttagaaggtacgggggcattgccccctggagtcatattcattagcgcaccacggtagcaacaatatccgaatgcatatcgtcaatagtccgaccgcggcaggcgtgaccatgagcggtaaagtcccattgcccgttgttacggcgcagtgacgcaataacaataccggtatgagccccctggtcggttagctggtaacgagccatttctttattatttccccgatccacgacgcggcagaatgcgttatctacgtcattaaacgtctggccgcgaaagctgttaacggtgaacgcgaggtattcaacctgatgtggtaagcggttcaaatccacgcgaatgacttcgtcatcgccgtcgccttcaccagtcagattgtcgccggtatgaacaacggagccgcaagacgactctaatttacggaaccagatagtatcgatggtattaccggatttatccattaatacacaacccgcatcaagatcaatggaattatttccgccaaaaaggctgcctaataacccttttttcttaattggatcccagcctaaaccaaattgaagttggctaagagaagaagattgtttactcagtgagaccgtctggtttttgcttaatgaaaccatattttatattccttcaacaggatatgaaaaataaccacattttttacattaaagtcgtgaatccaaaaatcatatcatgatgaagttcttgaacaagttaatttttagtcattatcgttaacaaatcatttatttgaatgatatataagatattttatttttatacccttagcggaataagcttttttgccatctaaaatcttttcatatctttacattataaacacaaaaaatataagtcataatatgattgacatacaaaaataacgtccatagactctcggctatttaattcgcctgtcggccctgcgtggaaatagatatcaatggcacataaaatttggcttatggaaggtttgtcctcccaacgggatattattcagggcattaatactttcgctaaaaataaagatacggacattttcgttattgcttcccaccgtaatgaacgtaatgaaattctgtcgcaggcggacttggcagtactggagccaaaagaagaagaacagcgcctttcttttattctctcactggttaaaagacttgatattcaggccatccataccgggcgcaattccctatggttcgaatcccatcgcaacgaaattgaatgttccggcgtaaaactcactaccggagcccatagcgtggcgcggcttgaactggcggatgacaaagtgagttttgcccagtttatggagcagcaaaacctgccggtcgtgccttctattcgcgtggaatcactgtccgaattattccatttcatcacccactctccctttggtttaaaacctttgtgcgtaaaaccggtaaaagggatttatggcatgggattctggcgcttcgatgacaaggtttcggctatggcggcgtttacgcatccggaaaaccgcagggtgaatccgcacttgtatcttcgcgccctcgaagaatcggatagttttgaaccgctggtgttgatgccctatctgcctggcccggagtactccgttgatatgttggttgagcgaggaaaagtgctggcggcggtggctcgtcgtaaagaaggtgctcttcagtctctggaaaacgcaggggaagcttacgagctggggagagcctgtgccgaggccatgcaggctgacggactggtcaacgtccaaacccgccacaatgacagcggcaaacccgagttacttgaaatcaatatgcgcccttccggcggcatcggctacacgcgattcagcggcgtcaacctgccgggtttgtttgccctgcgccaactgggattaatgagccagcaagaagtgatggacgaactccgtagcgcattcacccccgctatcgttcgatccattaccgacgttgtgcgttatagcccaaccttgaccaacctactcccgcaggaatagtcaccatgaataatcactctggccttcagatataccgcagagagctttcctgcggcactctgagtgtgacgccaaccggaggcatcaccaccttcgacgacctgttcgaaatagcagaaaggcgtaatcctaaacgggcatttctttttgtcagcaaagtgcttggcagacatataccggtttcgccgacggtaatgcgttcggtttaccgtcagttaggggaacaaattccctccctgacgacagggccggtgctgtttattggcatggctgaaaccgccgttggcctaggagccggagtgtttgatgaaattcgacaccgtgtggccgagccggtctatctcacctcaacccggcatccggtagagggcgagttactgtgtgaattcaaagagaaccatagccacgccaccgatcatttgatttacctgccgcaagacgccgagctgcgccgccgggtattacaagccaaaaccgtggttttaatcgacgatgaagccaccaccggaaatacctttattaacctgctcgcggcattaagagagactgcgggtctacaccatattcagcaggtgattacggtcacactgaccgattggagcggtagttccatcgcggaacgctgcccgctgccggtgcaaaccgtttccttggcgcagggaaactggcactgggagaaaaatcctgacgcacctgtgccaatcatgccttctgtgaatatcaccgcttccggcaacgtcccgataaccggtaaacaaagctggggacggatcggaatgaatgagcctgagaatgatcttgggctatccattcagacgacggaaggagaaaagctattggtattgggaagcagcgaatttgtctgggaacccttcttactggcggagcggctggaaaaacagggagcagaggtcaaatacagttcaacgacccgctcaccgattgccaccagcttcgcgatcgaatcggccattgccttcaccgataattacggattaggcatccctaactttgtctataacgtggctcatcagcgttttgaccgaatcttgctatgtatcgaaacgccgacagaaagcgtcgatcccgcactgctggaggcgctgaaaaaagtggctccctccgttgaggttatttcctatgaataagccggttattttttccgatctggatgacaccctgtttcaaacgcgccgcaagatggtgaatgagctggatttgcagccttaccgcaccggtgccttggatcgcagcctggaaccgcgcagttttatgacggaagaacagaccatgctggtggattggatgctagagcatgccgagctgattcccgtcaccgcgcgaggaaccgaggaaatcgctcgggtcactattccgtttcgttcatgggccgtgaccactcatggtgccgtgattctcgatcctcaaggccagccggacgaaggctggaaaacgcagatgctggcggctttacagccttacgcagaaaagctagtcactatgcagcgtcaaatgaccgaactcatggaagccagaaatatcaacggctgggcgcggctcaattacgaatataaccatacgccgatctatctggtgatgaagcatcgggacagcaccaaactggatgagctaaacgcgattggcgatgaaattgaacagattttctcaaccgacggtttctatattcatcgcaacagcaacaatattgcctggctaccggagccggtagagaaagggttggcggtcacttatttactgaacaaactgcgggaggaacggggcgtatttccggttatcgggctcggtgacagcctgagtgaccaccgtttcatgaaactctgcacctggtatggattgcctcgccagagccagtttgctgaaagcatcgccagcaaaatctttggagaaaaataatatgcatgatttcatccctttttccggttcctatctaccggaagacgttcatttcctgctgaaaccggtcgaaatcgaaatgacaccggtggaacaaaaagaacggttgattcagtctggcgcacgccactattcggaaatgctgagtcaggaaccggagccaacctcttggcacttagatttattcacccgcgctctcgataacggcgcagatcgtcttgccaaagaagtggtgatgctggctaaggccttgattcaacgtttcggcgatacgccgattgtattaaccagcctggtgcgggcaggtgtccctctgggcgttatgctccaccaaacgctgcgggcaatgggaaaggaatctcatcattacggcattagtattatccgcgaccgcggtattgataccgttgcgttagattggattgaagctcgccacggtaccgaaggcattgtttttattgatggttggacggggaaaggagcgattaccggcgagttagtgcgttcgctaaaagatcggccaggctatccagaacagcctcgtttagtggtgctggccgatccctgcggatgttcgtggcttgccgccagcgacgacgattggttgattcctttcggcatcatgggcgcaccggtttccggcttaatctctcgctcgatctggtcggcagaagggctgcacggctgcgttcaatgcgatcacctcagccaatatgaatgtagccgtaagctggtgaataccgtagcggcatctcgccagaccttagatcttgccgccatccccgccagcgattgggattctcagcaaaaaacctatctaaagcagcgcagcgcacaagttatcagtgcgctggcagaaaaatatcagatttccagcgtcaaccgtattaagcccggcattgccgaagccacgcgcgctgtattacgtcgtgtgcctgatcatgttctggtgcgctccgtcaatgaccctgatgtcgctttgctggtttatctcgcccgcgagaaaggaataaccattaccgaagtcggtgacgagattggtcaataccgcgcagtcacaatcattaaaaaggtactctgatgaacaaacggctctccccttggcatttgggcgcgacattgtatatgcctgctacccgcacagacattgccgaggccatcttacataacaaaattagtgggttacgctcgctggttatctgtctggaagatgcggtaaacgaagctgatattcccacggctttaatcaatttacgtgagctgctagcggttctcgctcaggccaaggctactgatggcaatagccattggccgctggttttcattcgcccaaggcatattgaaatggggcaatggctaacggaaagtctggatctcagcccgatcgatgggttggtattgcctaaattcactttggcgtcattgcccgagtggtgggcaatcatacgagatagccatttatgcatgatgcccacgctcgaaaccgaagaggttttcgacgtcgttcaaatgcgccagcttgccagtgagctacaagctcatccttgccatcagcgtattattgctttgcgtattgggggcaacgatctgatgaatgtgatttctttgcgacgaacgcgtgatttcactttgtacgacggccctatgggttatgtgattaagatgctggtggccgttttttcctcgcgggattttgccctaacagcgccggtctgcgaacacattgatgaccatcaggtgatgaataaagagctggctcttgatatggctcacggtctggttgggaaaacagccattcatcctaatcaaatcagtaagatagaacaggccttaatggtatcacccacggattatgccgatgcattacgtatcctgaactcaacccaggccgtatttaaatctcagggatcaatgtgtgaacccgcaacccaccgtcgctgggcctccggtatcctcgctcgcgctcaggtttatggtattagtgcggaaccggggcaagacggcgtacgtctcatgaccgtgactcagaacagctgaagggaacagcatactgatttatcttaaatttaggatcttcctgatattatacacgccgcaaagatcgaaaataccgagttggttggcctcctgtggcacaaaaaaacaggggaaaccatcttggctcgaaacaggattatctgttgaggctggccggagtcgtcatttatgcactactctttgaagcggtgaacatctcaggattaaccaaatgcatcagcaagataacgggaaaccatctggttatcaggaagatgtccaccgtctttatcttcccggcaatagaattcttgaccatgaatgcaggcggtaactaactatgcaactcagcacaaaacaggctcgaatcttcacactggcaaatattctgggttcgggaaaaccagtctctgccattcgaattatttcgtcccttgattgttcagagcctacgctgacccgcgcgctaaaagaactgcgtgaatcctattcagctgaaataaagtacagcaaagccactcattcttatcagctggttagccccgggaatctggataaaaaagccttacgtagtatggccaaagtactaaccgcccacgcggagtcaaaaaacaacgaggtggttagtcgagtgtttcttgataaggataaaaagcgagcggtgtcgctttcgctcaaaggatctatcttacgtaaaatagataaactgtcccgattgatcgaatccacccgtagcgaagccgtagaaatgcttgccaataactgcattgatgatttgatccgtcatctccaaaccgccaaaaaagagaaataattgccggtttctcaaaaagaggatgaattagtctttgaaggccaattcatctccccggtacgcctgtaatctgcccgtaacctctagcgccaaaaccaagactctaaaaaaagtgaaagcgtattgcggcatttcagtcaaagcccgtatccgattgcaactgccagaaacgaaaaaacccagcgattacgctgggctttgatgttttatctgtgtttagatgacgccgataagaacccgaggatcagaacgggatatcgtcatcaaaatccattggtggctcgttgccgccctgctgctgtggcgctggagcagactgcgcctgacgtggagcctggccgccgctgaactgattgccaccctgaggttgctgaggctgaccccaaccgccctgtgcgccatcgttggaaccaccctgcgcgccgccagcaggagcaccgccgccttgacgaccacccagcatttgcatggtgccgccaacgttaacaaccacttccgtggtgtaacgttcctggccgctttgatcctgccatttgcgagtttgcagtgcgccttcgatataaacctgtgaacctttacgcagatattcaccagccacttctgccagcttgccgaacagcactacgcgatgccactcggttttctctttctgctcgccggtttgcttgtcacgccagctttcggaggtggccagtgtgatgttggcaactgccccaccgttcggcatgtaacggacttccgggtcttggcccaaattcccgaccaaaatcactttgtttacgcctctgctggccatgtgaactctcctgatgaagtaaatttgtacagtataaacgagtaagtttaacacgctagagcctaaacggcactgccgatcgttactgcgggacacattccagtttagcaaaacaatcagcctgaattgcagccatatactggatattcattcaggtttttttgtgtcataattatccgtttcgtactggccgtgtcctttttctggcgttgcaaagtgcattttttacattaggctgcgcaataaaggacacggtgagaggctcagtttaatccgggaaatgtttgtatggataatatcgaagttcggggcgctcgcacccataatctcaagaatatcaacctgattatcccgcgcgacaaactgattgttgtcaccggcctgtctggctctggtaagtcttcactggcgtttgataccttatatgccgaaggccagcgccgttacgttgagtctctttccgcctatgcgcgccagtttctgtcattgatggaaaaaccggacgttgaccatatcgaaggtctgtctccggccatttctatcgaacaaaaatctacgtctcataacccgcgttccactgtcggaaccattaccgaaattcacgattacctgcgcctgctgttcgctcgtgttggggagccgcgctgtccggatcatgatgttccgctggcggcacagaccgtcagccaaatggttgataacgtgctggcacagccggaaggtcgtcgtctgatgttactggctccggtggtgcaggatcgcaaaggcgaacacaccaaaacgctggaaaacctggcgacacaaggctatatccgcgcgcgcatcgacggcgaggtttgcgatctttccgatccgccgaagctggaactacagaaaaagcacaccattgaagtggtcgtggatcgttttaaagtgcgggaagatctggctcagcgtctggcagaatcctttgaaacggcgctagagctatccggcggcaccgcgatcgtggccgatatggacgatgcaaacgccgaagaactgctgttctccgccaattttgcctgcccaatctgtggctacagcatgagcgagctggaaccgcgcctgttctcctttaacaacccggccggtgcttgcccgacctgtgatggcttaggcgtacaacaattcttcgatccggatcgcgtgctacaaaaccctgagctctcgctggctggtggtgcaattcgcggttgggatcgccgcaatttctattatttccagatgctgcgttcactggcagagcactataaatttgatattgaagccccgttcaattccctgagcgcggaaacgcaaaaagcagtgctgtacggctccggcaaagaaagcatcgaattcaaatacatgaacgatcgtggcgataccacggtacgccgtcatccgtttgaaggcgtgttacacaacatggaacgccgttataaagaaacggaatccagcgcagttcgggaagaactggcgaaatttatcagcaaccgctcctgtgcttcttgccacggtactcgcttacgtagagaagcgcgctatgtgtttgtggaaaacaccacgctgccggaaatttccgaattaagcatcggccacgctctgaccttcttccagaatatgaaactaagcggccaacgcgcccaaattgcggaaaaagtcctgaaagagatcggcgaccggctgaagtttttggtcaacgtcggtctgaactacctttccttatcgcgttccgccgatacgctatccggcggcgaagcccagcgaattcgcctagctagccagattggagccggtttagtcggggtcatgtatgtgctggatgagccgtccatcggcttgcatcagcgggacaacgagcgcctgctggaaacattgattcacctgcgcaatctgggcaataccgtcattgtggtcgagcatgacgaagatgcgattcgcgccgcagatcatgtgattgatatcggcccaggcgctggcgttcacggtgggcaagtggtggcagaaggaaccgtcgatgacattatggcggctccagaatccttaaccggccagttccttagcggaaagcgggaaattgcggttccagcgcagcgtgttcccggcgatccgagtaaggtgttgaagctaatcggcgctaccggcaacaacctgaaagacgtgaccttaactctgccggttggcctgtttagctgtattaccggcgtatccggttcgggcaaatcaacgctgattaacgacactttgtattccattgcacagcgtcaattaaacggcgctaccattaccgaaccagcaccataccgtgatattcagggtttggaacatttcgataaagtcatagatatcgatcaaagtcctattggccggactccacgttccaacccggcaacctataccggtatctttacgcctgtgcgcgaattattcgccggggttcctgaatctcgcacccgcggctataacccaggccgtttcagctttaacgtgaaaggtgggcgctgcgaagcctgccagggcgatggcgtaattaaggtggaaatgcacttcctgccagatatttacgtcccttgcgatcagtgcaaaggtaaacgctataaccgtgaaacgctggaagtgaaatacaaaggcaaaaacattcacgaagtattggaaatgaccatcgaagaagcgcgggaattctttgatgcggtacctgcgctggcgcgtaagctgcaaacccttattgacgttgggctatcctatatttgtctggggcaatcagcgacgacgctgtccggcggtgaagcgcagcgcgtgaaactgtcgcgcgagctatccaaacgtggcacagggcaaaccctgtatattcttgatgaaccgactaccggcctgcattttgccgatattcagcaattgttggcggtattacaccagctgcgcgatcagggcaataccatcgtggtaattgagcataatctggacgtgattaaaaccgcagactggattgtggatctcggcccggaagggggcagcggcggcggtgagattttagtatcaggtacaccggaaaccgttgctgagtgcgaagcttctcataccgcgcgtttcctgaagccacttttgacgcgtaaataaaagcgcaataaaacgtgctatcggggggcgagttcatcgcctcccgctctgctgactctctaagatcaagcgcgtaattcttgccgaatctgttccgataaaccttgtaataccaattgataagagccatcaatcaacgcatagaattgagaatttggcagctttccatccagaaacaccgtgttccagtgcgctttattcaagtgatcactcggcacgatctccggatgctttccacgcagttgttctgctaattccggactacttttcaatgaaatagcaggacgcccccgtacctcgctaaccatggcaaacatcacatcgccaaccttaatctgattcgcctgccactcttcatgatcgctttgttccgctcccggtttagacatacagtattcgagtaatgtcgaattattcattcgcttatctcctgttatctggccgcattcagccataaaaaccgactattccaaagacggatttcctcagaatagtagccagagagcgttagattttcgctatccggttttctgatcatgcagtaatgccgtgagatttactgtgatcgatagatagccctgacattcctgacattaatgatgacacctactatcagtatattctttaatcatcccaccacaacccacgcatcaggaataggccatcaccttctgttcctcaatagaaaagggcgatatctctatcgcccttaggtacccaacacaatcagatcagatcagcgaaaattcactcgccatctgttgagtatttaaacaaaacggatttactgcacggcggcaaacgcagcggctacctgctgaacattttggtgattaaccccagccatgcacacacggccactcgcgatcaggtaaacaccgaattcttctcgcagacgatccacctgctgttcagtaaaaccggtatagctaaacatgccgcgttgagtcagcaaataatcgaagttacgctgcggcagcgctactttcagtgccgcgaccagagtgttacgcatttccagaatacgggtgcgcatttgctcgacttcattgcgccactggctgcttaattcttcgtcattcaagaccttagccacaacctgcgcaccaaagttcggtgggctggaatagttgcgccgaacagtagctttgagctgccccaacacgcggcctgcggcttcttcgctttcacataccacggataagccgccaacacgctcgccgtacattgagaaaattttagaaaaagagttgctgactaaacacggcaaaccttccgcggccatctggcgaatggcataggcatcttcattcagaccagcaccaaaaccttgataagcaatatcgaggaatgggatcaattcccgttctttggcgatcctgatgatctgatcccactgatcgttagtcagatccgagccggtcgggttatggcagcacggatgtaacagcacaatgcttcttgccggtaactgctgcaaagtggccgacattgcctcgaaattaacggctaacttttcattatcaaagtacggataggtgttcaccttaaaacccgcaccgctgaaaattgcaatatgattttcccaggttggatcgctgacccacacttgagaatccgggaagtagtggtacaggaaatcagcccctacattcaacgcgccagacccccctacggtttgaatagtggctatacgactttgttccagcatcgggtgatcttgcccaaacagcaaatgctgaatagcagaacgataagcctgcaaaccttccatcggtaaatagaccgacgcagcctgtggctgagcgctcatttgcgcttccgctgtggctaccgcctgcaattgcgggatcacaccctgagcatcgtaataaagcccaatactcaggttaactttatgctctctggtatcggctttaaaactttccatcagcgaaaggatgggatcacctgcataggcatctacattctggaacacggcattactctccttaattaggtgcaaccaaaatagcactaacttaccctgccaggctactcaggaataaaagcgtttactgaaagtaataaataactttacctcatgttttataatgtaattattaggattctctctctaaaaaactcaggaatgagaaaataataatcagtgaggtattcggctctgactaaaacgaaaaaggcgcacatatcgctatgccgcgccttcagatgacttgctaaatcatgctcggtgaaactattcgccgatatattccattgatacgcgagacgttagtttggtaatcaattcataagcgctgataccggtagcgatagccactttttccactggcaaatccgctccccatagctccacttcatcacccactttatccctagaatccgggccgagatcgacagaaatcatatccatagaaactcgtccaacgagcggcacttcgcgaccattcacccacaccggcgtgccggacggcgcgcttcgcggatagccatcgccgtagcccatcgccactacgcctaaacgcgtatcccgcgggctgatccaggttccaccgtagccaaccggttcaccggttttatgctcgcgtaccgcaatcagactggatttcagcgtcatcaccggttgcagaccaaaatcggctccggttttctgctccatcggggaaacaccatacaatataatgcctgggcgaacccaatcgcgatgggattccggccacagcaagattccgccggacgcagcaattgactgtttacccggtttcccagtggcaaactcatcaatgcactgaatttgcagtgttgttgccgagacttccggttcatctgcgcggctaaagtggctcataatattcaccggctgaaccacattcgagcaagcgctcaggcgctgataaaacgcttcggcctcctccggacgcacacccagacgatgcattccggtatccagtttcatccagacattaatcggataaggtaaatctgcctgttctaatgcttccaattgctcaacgctgtggatggccgtttcgatatgattgaccactaataccggtaaatcctcagcggaaaagaaaccttccagcaataagataggtttcacgatcccgccggagcgcagcataagtgcctctccgatacgagcgacgccataacaatcagcatcttgtaacgtgcgcgcagtttctaacagcccgtggccataagcgtttgctttcacaacggcaatcaggcggctttgcggcgccagacgccgaacctgttgcaagttatgtcgcagagcgcggcggtcgattactgcggttgccgctttcattttctatccttaattatcaatatgtacccaagaaaattggagcttcagctcaattgaagacgaaccacccaataagctgaattaagcaagaaattcatgtaaatgaacgttaactaactaccttaaaactccagattcgctggggattattcgtcgtcgtattgcggaccggcataattatcaaagcgcgaccactgaccgttgaaggtcaaacgaaccgaaccgatcggaccattacgttgtttacccaaaatgatttctgcgatgcccttcatatcgctattttcgtgataaacctcatcgcgataaataaacatgatcaagtcggcatcctgctcaatcgagccagattcacgtaagtcggagttcaccggccgcttatcggcacgctgctccaggcttcggttaagctgagaaagcgccaccaccggtacctgtagttctttcgccaacgccttgagggagcgagaaatttccgcaatttccaaagtacggttatcagaaagcgcaggtacccgcatcaattgcaggtagtcgatcataatcatgctcaggccaccgttttcacggtaaattcgccgcgctcgcgagcgcacttccgtcggcgtcaggcccgaagagtcatcaatatacatattgcgtttttccagcagaatacccatggtgctggaaatacgcgcccaatcctcatcatccaactgaccggtacgaatgcgggtttgatcgacgcgagacagggacgcgagcatacgcatcataatctggtttccgggcatctccagactgaagataagcaccggtttgtcctgcatcattgccgcgttttcgcaaaggttcatggcgaaagtggttttacccatcgacggacgcgccgccacgatgatcaaatctgatttctgtaaacccgcggttttcttatccaaatcctgatagccggtagaaacgccggtcacgccatcatgcgggcgctgataaagttgctcaatacgcgcaacggtatcttccagaatccggtcgatacttttcggaccttcatctttattgacgcggttttccgcaatctggaataccttggattcggccagatccagtagatcttcactggtacgcccttgaggatcgtaaccggcatcagcgatctcgtttgcgaccgaaatcatttcgcgtactactgcacgttcacgaacaatatcggcataagcgccgatgttcgccgcacttggcgtattttttgacaactcggccagataagcaaaaccgccgacggactccagatcccctttctgttccaatgattcggaaagagtgatcaagtcgatcggcttgctcatttccagcaagcgttgcatttcagtaaagatccggcgatgagggcgactgaagaaatcgttgctggtaactcgttcggaaacgttgtcccagcgttcgttatccagcatcaaaccgcccaacacggactgctctgcctccagcgaatgaggcgggagtttcagcccttccatctggcggtctcgtggctctgtcgtattgttggttggtttttttcctgccatgaagagtgttctttacccggttgagaatagaaaatataacgacccagtatacgcgatgataggcagcgagtaattatatacccgttgaattagctatcgcatatcggtattagcctcatggttataaaggtggaaccgccaacatcttagctgtagggttaaatgacttccattatgaggatttcacatggccaagcgtattcagttttccacaaccggcggtcccgatgtgttgcaatatattgattttacgccaaaggatccggaagaacatgaggtgcaggtggaaaataaagccatcggcattaactatattgatacctacatccgcagcggtttatacccgccagcccagcttccaagcagcttgggaaccgaaggggcgggagttatcaaaaaggtcggttcggcggtgagcactttaaaagtaggtgatcgcgtggtgtatgcacaatcagcccttggtgcttacagtgaaattcataatgttccagccgaaaagatcgctctgttgccagataacatttcttttgagcaagcagcggcctcatttctgaaagggttgacggtgcaatatttgctacgtcaaacctacgaaatcaaaccaggagaaaccttcctgtttcacgctgccgccggtggcgtcgggctgattgcctgccaatgggcaaaagcgctgggagccagactgattggaaccgtaggctctgacgaaaaagccgagttggcaaaagcggcaggagcctgggccacaataaactacgctaaagaaaatatctcgcaacgggttatcgagctgactcaaggggaaaaagtaaaggttgtttatgattccgtcggaaaaagcacttggattgattcactcagcagcctgcaaaagcgcggcttactcgtaagtttcggtaacgcttccggcccggttaccggcgtggatttaggtattctcaaccagaaaggcggactttatgttactcggccatcgctaaattggtatgttaccaatcggcaggaacttgagcaggccagcagcgagctattctcactgattgcctgcggcgcgattaacgtcgatgtagcaccagagcagaagtttccactgagtcaagcccaacgggcgcacctgatgctggaaggcaggaaaaccaccggctccagccttctcattcctggaaactaacgattaactgacgtttattttcggcaattatcctgatttcagccagtaaaaaagggttcccgcaaaggaacccttttttataacgcattgatacagtgtaggggtacagcagtgtattccgacggaaaagagtgcggcttatgccactattgttattcccggcgaagatgaaaatattgatacaagaaactatcgattcgcatcctagcagccagttcaggcaaaaaaaacgctttaaccgcaaattagcggataaatgtttcaagctgtgatcacaaccgcaaaacctctgttcaacttttcttcagttgcatttatttcatgtggtttacacaagaaaaacttatcttaacattttgttctttctgccatttagccgacagaagccgatcgatattccatcaattatattagtagcgacgaatagtcggattctgcatagcgcgccagatccatacaatcgcaacggctaaaatcagccacggtaataacttaatcatcatcacaaataacccaccgaccatcataaaagcagccgcaaccagcaaagcacctaaaatgcccagcagggaaataccggtcaccatcagcatgatgaaaaaaccgataacaaagaaaatctctaacatggttggctcctcaataattgttatcatccaaaatattggataatgctgattgggtattacaagaagcgtgccagcttatagataagggctaattgactgaattaaatagagatgaacaattgtagcccgctaaagaacataacgggcttggtcattttgactaacttatagtgaattatgttgaggctgtttcactaatgataaggctttctctaccacggaaacatcggcgccaggcttatgagcattctcgcttaaatggcggcgccactgacgcgcaccgggaatgccctggaagatgcccagaatatgtcgggtgatatggcctaaataagccccacgcgctaattcttgctcaatgtagggatagagagcctctaccgccgctacactatccgtaatcgccgcctgtggatcgaagagttcgcggtctacctgcgtcaaaatactcggattttgatatgcctcgcggccaatcatcacgccatcgagatatttgaggtgttctttcgcttcatccaaggttttcacgccgccgttgatggcgatggtcaactcggggaaatcacgctttagctgataaactcgcggataatccagaggtggcacttcacgattttccttcggactcaaaccggatagccaggctttacgcgcatgaatagtaaacatatcgcaaccgccctgctctgagactttctgcacgaaatcacacaaaaactcgtagctgtcctgatcgtcaatgccgattcgggttttaaccgttaccggtatggaaaccacatcgcgcatcgctttaacacaatcggcaaccagctccgcttcccccatcaaacaggcaccaaagcgaccgttttgcacccgatcggaagggcaaccaacattcagattaatttcgttataaccacgctgttccgctagtttcgcgcaatgggctaacgcctgcggatcgctgccgcccaattgtagcgctaccggatgatcttgctcactgtaagccagataatcagccttgccgtggataatggcaccagtggtgaccatttccgtgtaaagcagcgcctgtttggtcagcaaacggtggaaatagcggcagtgacgatccgtccaatcgagcatcggcgcgacggagaaacgttgtaatgggtagcctgaatgaccagtttgggcgttagatacagtctgattttcgtgcatgtgcggtgagtttcatcggttgttattacgtcaattcccgctgttttggttgcatagcaaatcatcagtgggctggaatgcgggattataccatagaacctaaggacgcattccagcgcaataatcttacgacttaacctattgatctatgcggaaatgtgacgcggatagaggtaactcacggcgcctatcggcgatcacgcggagatatgttaaaattgcacaaataataatgttgcgggacgattatcatgacttcaatcaaccaagaaaagctgcttgctcaggccgaaagcctgtgtaaacaacgaaatgtacggctgactccgcaacgtttggaagttttgcgtctgatggcacagcaaccgggcgcaatcagcgcttatgatctgctggatttattgcgggtttccgagcctcaggctaagccgccaaccgtctatcgcgctttggattttcttttagaacaaggatttatacacaaagttgagtcggcaaacagctatgtgctgtgccatcattttgaggagccgctgcacacctcagcgctgtttatttgcgatcgctgcggtttggtaacggaaaaaaccaccgttggtattgaagaagccttagctttgctggcgaaacaatcaggttttgcgctgcgtcacagcgtggtagaggctcacggcctttgcgccacgtgcggcgaagtcgaagcctgtgatagccatgaacattgcgatcacgaccatagtctagtggcaaaaagaaagtaaccttggaaaagtaacccctggtgcagaaatcatttctgtcgtcatacggcggcagaaataaaataaaaaatggtttgtcgtcatgactcactgtattaattaacattgtattgattgacattaattataaccaacactggaagtgtcagcacctccttgtgcttgcaacatcttaatataaaacatgtaaacttgatgatattaaattatattttaataaataactctatttataaaatatcgacacatttaataacaccgtggagggaggtaagttttatattcatatattaataccaactcaggttaccagcgatatttggtatgatcttcccaagctttcacttctttttccgcagcttccttctgataaccgtatttttcctgaattttacctaccagctgttcgcgtttcccttctatcaccttcaggtcatcatccgtcagcttgccccatttctctttaattttccctttaaactgcttccagttaccgtcggcttgatctttattcataatatctccgttaacttttgttagctcagtttatttaattcctattaatatataggctaatataattaccagtaaattaataagacaatcttaaattgaatcgttgtcttattcttaccgtgaaataactatagcagagcattctgccgatggctaaattagtactatggaatagtaatgaaatagtaggcaggctaagaaaacctcatattattctgtatttaaatcagcaagtaactcgttattatcggatagttctcaatattactaaaacactgtcatgtgagtgattaaccaatatatatgccttcatttctgatgagatacaggattatttgagtcgtagcacacataataaaaccccaatgaaggggctttatttaagggataaaatcaattgctattaacgctaactaccgcaggtaggaatacgtggttcgttaaatccagtcgccattgcggataacgccaacggctaaaccttcgatagtaaatgtttgctcgcgcagatcgacgacgatgggctgaaattcactgttttcaggcagcaactgaacaatattaccttgttttttcagacgcttaacagtaacttcatcatcaatacgcgccaccacaacctgcccattgcgcacatcctgagttttatgaaccgcaagcaaatcaccgtccagaataccgatatctctcatagacataccgtttacccgcagcagaaaatcagcattaggcttaaacagcgaaggatcaactttatagtgaccttcaatatgctgctgcgctaacagcggttcgcccgcagcaacccggccaatcagcggcaggccttcttcgtcttccattaataggcgaataccacgagaagcgccggagacgatctcaatcacccctttacgcgccaacgcctttagatgctcttctgcggcattaggcgaacggaaccccagacgctgcgcgatctcggcacgtgtcggtggcatgcccgtttgcgagatgtgatcgcgaaccaagtcgtagacctgttgctgtctggtagtaagtgctttcattccgccccctgtttgtttatacagtttagctgtgagtatatacagccaaacccctattgggaaccgaagagtgaataaaaacagggattaatggctgtattgttcttcaccactatttgctctttccctgaactatgccaaattcaagtattgccacagcacagtagcccaaataaataccgccagcaggatagtgatgagcactgcggcggaccccatatcctttgcccgacctgaaaggtcatgcagctcgctgccaatccggtcaacaaccgcttcaatcgcactgttgataatttcaaccaccaccaccaagacgacagatccgatcaataaaattcgctctatgactcccacatcaagccagaaggccagtatgatagcgatgacggccaccacggcctcctgccggaaagcggcttcatttttccaagcagcggttaaccctttcacagaataacctgccgctttatagatacgggttagtcctgttgattgattagccatgagttatgtacctttttattggattgataatagtttcgctgcttccatcagtctgatcaccacagatctcaaaacgagtttctggtatccttgcggcgaattgctaacaagaggcttcacgttgttatgtcaggttggcgtaaaatatattataagttactgaatttaccacttaaattgttggtaaaaagcaaggtaatccccgcagatcctgtgactgaactggggttagacccgtcacgtccaattttgtatgttttaccttataactctaaggctgatttgctgacattgcgagcgcagtgcctggcacaagatcttcccgatccgttgattccactggaaatagacggtgcacagctgccaagtcacgttttcatcgataatggcccacgggtatttcgctattatgccccgaagcaggaatcggtaaaattattccacgattatctggatctgcatcgcaataatcctgagctggatattcagatgctaccggtatcagtaatgtttggccgctctccgggccgggaaggtcacggtacaccacatctgcgcgtactgaacggcgtacaaaaattctttgccgtactgtggctgggtcgcgatagctttgtgcgattctcgactaccgtttccctgcgccgcatggccagtgagcacggcactgacaaaaccatcgcccataagctggccagagtcgcgcgtatgcacttctctcgtcagcgtttagctgccgttggcccaagtctgccggcacgtcaggagctatttaaaaagctgctggcgtcaaaagctatcgaaaaagcggtggctgatgaagcgcgtaccaagaaaatttcccacgaaaaagcgcagcaaaatgccatcaatttgatggaagagattgcggcaaacttctcttatgaagccgtgcgtttatccgatcgcgtgttgagttggacctggaaccgtctgtatcagggcatcaatgttcataacgccgagcgcgtgcgccaattggcacaagatggccacgaaatcgtgtatgtcccctgccatcgtagccacatggactatctgttgctgtcctacgtgctttatcatcaaggcctggtaccgccgcatattgctgccggtatcaacctgaacttctggccggctggcccgattttccgtcgtttaggtgccttctttattcgccgtacctttaagggcaacaagctgtattccaccgtgttccgtgaatacctaggtgagctattcacccgtggttattccgttgaatactttgtggaaggtggccgttcacgcaccggtcggctgctggaacccaaaactggcaccctgtcgatgacaatacaggccatgctacgcggcggctcccgccctattactctggtgccaatttacatcggttacgagcacgtaatggaagttgggacatacgccaaagaactgcgcggcgcgaccaaagagaaagaaagcctgatgcaaatgctgcgcggtctgcgcaaacttcgcaatttgggtcagggctatgtgaactttggcgaacctttgccattgactacttatctcaacaacaacgtgccagactggcgtgatgctatcgatccaatcgaagctcagcgcccaagttggctgactccggcggttaacgatttagccgctaaaattatggttcgtatcaataatgccgcagcggctaacgcaatgaacttatgttctaccgcgctgctggcatcgcgtcagcgttcattgactcgcgagcaactgttggagcaactcgattgctacctgcaactgctacgcaatgtgccttacgccaaagatgtgaccgtaccggataaaacgccggaagagttgctgaaccacgcgttgaaaatgaataagttcgaggtagagaaagacaacatcggtgacatcataatcctgccacgtgagcaggcggtgttaatgacttactaccgtaataatattcagcacttgctgatgctgccttcactgattgctagcatggtgatgtaccatcgccgtattactcgttccgagttattacgcaagatcggtatgatttacccaatgctgaaagccgagcttttcctgcattataccaaggaagaacttgcgccaacgctggatacgctggttaacgaactggcgcgccaacagttgatttgcgataaaggcgatgaattagtgttgaatccagcgcgtattcgtccgttgcagctgctggccgctggcgtgcgtgaaactctgcaacgctacgcaattacgctctctttgctcagcgcaaacccaagcatcaatcggggcgcgctggagaaagagagtcgcatcatggcgcagcgtctttccgtactgcatggtattaacgcgccggaattctttgataaggccgtattctccacgctggttgcaactctgcgcgaagaaggctatatcaacgatattggcgatgcggtgcaggaacatacgctggaagtttacaatatgctaagcaacctgatgacgccggaagtgaagctgacgattgaaagcgtcagtatgcctgccgagacaaatcagttacctgctccagataaaccagcagaataatttccagatagctgaataagcaaagggccagataatatctggccctttctatttgtatcatttggggtttaattcaatgaccaatagctcaacagaatcccaaggaacagaaccaaaccaacgtaattattattcaggaaagcctggaaacaaggttcacgctgacgtttagcaatcattttctgctgatgaataaatagagcgccggctaataaaacggaccaatagaacgccccgcctaaatgcatcagataaccgataatcaccatcaataacaacgtagccagttgcagcaacccgacgatgaggcggtcatactgaccgaatagaatagccgtggatttgacgccaatttttaggtcatcgtccctatctaccatcgcatacagcgtgtcataagcgacggtccagcaaatattcgccaacagcaacaaccaacataccagcggcaggctttcgcttactgcggcaaaacccattggaatcgaccagccaaatgccgtgcctaacaccacctgcggcaagttggttacccgcttcataaagggataaatccaggccagtgccagccccaccagagatagccagatggtcatactgtttaaggtcagaaccagcccgaacgagatcagcaccagtacgccaaacaggattttgctttctttttcgctcacagcgccactgggcaatggccgtgaagcggtgcgttttacgtgtccatcgattttacgatcggcgaaatcattcaccacacagcctgcggcacgcatcataaacacgcccagcacgaacacgatcagaatttttgcatcaggaataccgcgtcctgccagccataacgcccataatgttggccacagtaacagcagtgaaccaataggcttatcaattcgcatcaaacggcaataggcgcgccatttgctttgaagaacacttccatccaatttatttatctcccaaatctttgctcatagtcacaccctggaaagctgatataacggcgacgctggcaagaatacttccgtcagtaacaggggtttcccagacaggcgtaaaagtgaacggcgcgcccaaagcttttcctgtaaccccgtttggatatagtctcgcgtcagagcatcgccactgaacagatagcgccctagaggcaccgttcccagatccaccagcgcacgatcggagccagaaagggtttcttctggcaccaccgtccgccccaataaccaaggctgagcatcaccgaacaaaataacttctctcagccaataacgctggcttatcggcaaatgttccgcctcttcacccagttcatcgcgagtaataaaacattccagctttggttcgatatgtacccgttggcaatgttgctcaaaacggcgggtcattgaccccagctccatcaaccaatcggcaatatcggcactgagattaggctgatcaatagatcgccattgaataggttttagaattgatacctcgccgtatgacattcggctcgctcccgccggggatacatctggctccccgcaattggtcaacatggggctattgtagcgcagaaagcccttggggtaacacgtcgagtagcatctgatgatcataacgacaacagtgagttaactgcgtcacatttgcagaatgcattaggtaaattgatctaattaagagaaataaggtttagaaagggaagaacgcgataaccatcataaatcatcgccaaagatgtcgcagataaaatcagtcggggtatacattcgtacgtaaaccaaaatccacacgcgcagtagccgccatagatcacaaagaaaaaaggtgcgccacggcgcaccaatcatccagccacattcggcagcgctgggtatctagcccttgcctttgacgctgccaataaaggtttgacgcgcggaggttgagcctagtttttccgcttcattcagcagtttcagcgctttatccacatcgcccgcttttaccgcatctttgatcgcctgattgaaatagctttcggtatcgttaagcattggctcggtcggtttactcaccgtagccggtgcggctgccactacgggctgagtatttccgaccacgacaggagcgggcgcggctggctgagtgaaaccaatcataatgttgcccatgctttgttccgcagtggctttgattttcagcacaccagtcggagcatggctggcgataggatcgggaatatttggtactgcgttacctacgccttgggcataggctttggccggatcgagcagttgagtcgtttttgccagatcctgtttggtggtgtacaccagcaggtagatttgtttttggcctaatgctggagtcagtttcagtacgccttcaagacgatcgaaactcatgatgccggctttttcgtaggtaaaatagctggctggatagtaggccgccgggcgcatttgttcgtccagcaccacgacgcttggagagtagagtttattatccaccacctgactactcagcgtgacttccatcgaaccgcgatcggctggcaacgcgaaagcggctaccgcaccttcaatttcaccctgagaaatatgcgggctggcgttggtcagtttgatttcctgcgacgccggtggaactaacggttgccacggcaagctttgtaaagtcgatggactaatgctcggtgcaaccgaaacattggccggagaaatagtagaagcggcctgcactgccagcggcgcagtcaaacccaaggccagagacaaacagagtgacagcagattctttttcattgttataccctcatagattgagcgtcagcgctaactccgcacgggcaaggtcggcaaagttaaccaatccataaccctttatgtttcaatcggctttaaggtggcgatttgaaatttatcgggttatcacttgatcttgctttaaaaaatcaaacagccgccccgaaggacggctgcgtcactgctgttaccaccaggcttcgaattgtgcgccgaaggttacttcgttgtttttaccacggctatcggtgccgatagtgccgttctgcgccagcccgaggtcaggactgcccttaacgttatcgtagccccatttctcatcccagtttgcataggttgcaaacacgcggatggccggacgagaccagatgctatcccccgcctgccattgttgagccagagtcagtttgtactggccgttacggtcgccggtacgctgagatttcacgttgtcgtagcctgcttccagtaaggtgctcatgatcggcgtccatttatacattgggcgcacgcccacactgtaccaagtggtgccgtttttgttatcccaatcggtatcctggtataaagcgacgtacatcatgtcccatttttcagccagattaatggcaccgtggtcaataatacgcagcatactgccgttgttattcaccagagagccctgtgaatggccgctgttccatgaggtcatcgaatcggtggcgtactgaaccacaaatttgttaaagccgccgaacatgctttgagtatgttccgccgtcagcaagacgccgtctttggtcgcatcttgtgccaatgcataaccgtcctgagtattagcgcgaccgtagtccacaccgaactcaagcgtaccgcctgggttggtttccaatccggctaaacgcacgtcaaacacgtcattaatggttttatctgcatctttacgctgattatcgatccaggcgctggagccaccggcttcagagttacgggttgcggccaaagacagcttgccgaagcccagatcgatgttttccaaacctgcacctgggccggagatatcccagtagtagaagtcgatcatgtgaacgtcatgacgttgatagaagcgtttacctgcccacatggtggaacccggcaaccattcgatcagattcttaccctgcacgttggcttcacggaaagcgggatccgttgattcccaatcgtcacgctgtgatacggaataggctacgttggtatcgaagtagaagcttttatccccttctttccacagttcctggcctaatttgatttccgcataggtttcacattcgttgcccaaacggtatttagtttgagcgccggtggttttgaaacattgttgctcaccgccgctccctgtccaaccgataccagaacgtgcataaccgtggaaatctacggccatcgcttgtgttgacagaacaccagcggcaacagccagtgctatcggtaacttgcgcagagtagtcatcagaaatctcctgtttaatttgcctaacggcgtgcgtgctttacattcactgtcagtagacgcccggctcttgatgcagccgttgacacgcagagccatcttcacggaacagatgacagcgatatggcggcagcccgatggcgaatgttgcaccttcttctaccagcaccacgtcgttctggcggtaaaccaggttctgacgtattgcggggatttggatatgaatctgtgtttcattgcccagttgctctactacctgaatcgggccttccagcgtgacttccgattcgctgcttggcagcagatgctccggtcgaatacccagcgacatattggcgccgacctgtacgcgatcgccttccaccggtagccagaccaactggcggttcggtagctcgatttgtacctgacgaggctcaacggcggtcactttcactgggaggaaattcatttttggcgaaccgataaaaccggcgacaaagcggttggccgggtagtgatatagctccagcggtttacccacctgcgccacgttaccggcatccaacaccacgattttgtctgccagcgtcatggcttcgacctgatcgtgcgtaacgtaaatcatggtgcgttgcaggcgcttgtgaagtcgggaaatctcaatgcgcatctgcacccgcagcgcggcgtccaggttggataagggttcgtccagcaggaacacatccggttcagccaccagcgtacgaccaatagcgactcgctgacgttgcccgccggacaaggcttttggccgacgatccaataggtgcgccagttgcagcacttcagcgacctgattaactcgctggttaatttcagtttttttggcaccggccagcttcaggccgaaagacatgttttccgccaccgacagatggggatagagcgcataagactggaataccatgccgatgccgcgttctgcgggcggcacttcgttcatccgtttaccgccgatcaacaactcgccagcggtaatatcctcaagaccggctatcatgcgcagcagcgttgatttcccgcagcctgacggaccgacaaacaccacaaattcaccatcttcgatctccagattgacgtctttggagatcacgacctcaccaaaggccttataaacgccgcttagcgttacgttagccatgcgttactcctttgcttgcgcaaacaactttttcatgtgaatccgattgaagaaaaatggcggaagcaaaacccggcataacccagcgatgactcccagcactctgatgactttctctctgcgcgccgtgccgccatgccactggcaaggttgcctcggacggcgtcgccgtctgagtataaggctgcaaattgatcagcgcttcaacacattgatcttgctgggtaataaataatctgattacgccgttctgctggctgatttcagccagttgcccttgttgaatcaccggctgacggcgtagagccaacaacgtttggcaaaagcgcagggtggaatcaggatcctgctgctggcggctgatggccatagcgcgatgttcaatagccacacgctgataccaatgaatctctccggacgtagcctgctctggcgcttcgtgccacggcatcggcgtctgcgcaccttgtggttcctgtagcgaagcggcgtgaggcaagcccagctcttccccttggtacagcgctataggcgcgggcaatagcgccagcaaggtcagaaaagcgtctgcggagcgaagatcgccctgcccccagttgctcactacccgtggccgctcggcgtcgccggtgctccacacggactgagaaagcgtggcccgacgctcggctaataccgacaccagtttttccgaactgaacggcaccacctgctgagccaaggcaccttgcaatagcggttgctgtaacgcctcggagcctgcgttgctctgtgggttaatccacaccgccaggccttgttcggctaaccgccgagccgtctgctcgcagggttgcatatcctgtggcacaaccagcccatcaatcgataaggcgttcagataagtcagtgctctcaacaggccgcgataatcccccatgccgtcgccgtttccgtcacggaaactgatcgggtgaacccgatacaacgtaggatgaggaacggcacgcgctggcaacatagtcctggccctgcaaactgtggttaaaattgatgctgctgatactgcgggaatgccgcaatttggtaatcatccgtaacaaagtttttcatgggggaggagatgggaggatgagagaggtaagggggtaagcgaaagttcccaccgaaagacaaattcgtgatcctgcttacaaatttcgaccggtatttttgtggctaaccccacagaataggcagcagtgttaactgggtcacaataaccttgtcgggggcgtagacggggggaggatgagactgtgtccggttgtgacccaatatgacagcgtactaaattgcagcgcacccacattatgacgctgtcgctgccacctcgcactgtgactcacagctacccgataagcggctattgattcacacgaaagtcggtgcccacaaaattggataaaaggattggattatgactcacagtttcatgaagtccggcgttggtaagaccgctcgagtcctggcgctttccgcgctgaccacgctggtactttcctcttccgcttttgccaagattgaagaaggtaagctggttatctggatcaatggcgataaaggctataacggtctggcagaagtgggtaaaaaattcgagaaagataccggtattaaagtcaccatcgaacatcccgataaactggaagagaaattcccgcaggttgcggccaccggcgacggccctgacattatcttctgggctcacgaccgtttcggcggctacgcgcaatccggcctgctggccgaagtccatccatccaaagccttccaggacaaactgttcccattcacctgggacgcggtgcgtttcaacggtaagctgatcgcctacccaatcgcggtggaagcgctatcgctgatttataacaaagacattattaaagacgcgccaaaaacctgggaagaaatcccagcgctggataaagaactgcgggccaaaggcaaaagcgccatcatgtggaacctgcaagaaccctacttcacttggccggttattgccgctgacggcggttatgccttcaagtttgaaaacggcatctataacgtgaaagacgtcggtgttaacaatgccggagccaaagctggcctgcaattcatcgtcgatttggtgaaaaacaagcatatcaatgccgatactgactattccatcgctgaagccgcctttaacaaaggccaaaccgcgatgaccatcaacggcccgtgggcgtggtcaaatatcgacaagagtaaaatcaactacggcgtcacgctattgccgactttccacggccagccgtctaaacctttcgtcggagtattaagtgccggtatcaacgccgccagcccgaataaagagttagccactgaattcctggaaaactacctgttgaccgaccaaggcctggctgaagtaaataaagacaagccgctgggcgccgtggcgctgaaatccttccaagagcagttggcgaaagatccgaagattgccgccaccatggataacgccaccaaaggcgaaatcatgccgaatatcccgcagatgagcgcattctggtacgccacgcgcagcgcggtattgaacgcaatcaatggtcgacaaactgtagaagccgcattgaacgatgccgcgactcgtattaccaagtaacggctctgctcgttaaaggggcacggattccgtgccctgataaattcttcacgtcagatcgcagtgctgtagtcgctacagaatggccaaatagtcacaaaagggacccgttatgcagttatcccaaaccgaaagttatggacgcaaaaagaaagtcgcctggtggcagagtgatgcgctgaagtggctggctattggccttatcagcctgtttacctgctatctgatcatattaatgtatgcgcaaggtgaatatctttttgccatagtgacgctgattctggttagccttgggctgtacgtgtttgccaaccgtcgcgcctatgcctggcgctatgtttaccccggcgtggccggtatggggctattcgtcctgttcccgctgatttgtaccatcgccatcgcctttaccaactacagcagcaccaaccagttaacctttgagcgggcgcaatccgtattgatggatcgtcagttccagaccggaaaaacctacggcttcggcctctatcctgcgggcaatcaatggcgtttacagctcaccacgccggatagcgatcaacttttgatatctgagcctttcagcctcgatgggctgagcgagcagcgagttaacgtcgctccggccaacactgaagcacagggtgaacgcgcctctttgcgagtgattactcaaaaccgtcaggcgctaaaccaattggtcgcggtattgcctgatggcggcgaactgcgcatgagttcactgcgccaatttgccggaaccagcccgctgtatgcgcttggtgcagacggcagggagctgattaataagcaaacaggcgttatttatcggcccaatattgcagaaggcttttatcaggccgtcaacgccgatggacagtgggaaaatgaaaaactcagccccggctttaccgtcactattggctggaaaaacttcctgcgcgtgctgcacgatgaaggcatccaaaaaccgtttatctcaatctttgtctggaccattattttctcggttctgagcgtgacctttactgtcgccgtgggcatggtgctggcgtgcgcagtacaatgggacgcattgaaaggcaaagctatttaccgagtgatgctgattctgccctatgcggtgccgtcctttatctccattttgattttcaaagggttattcaaccaaagcttcggtgaaattaacctgatgctgagccacctgtttggtatcaaaccggcgtggtttaacgatcctctgaccgccaagagcatgattttaatcgtcaatacctggctgggttatccctacatgatgattctgtgcatgggattattgaaagccatccctgacgatttatacgaggcttccgcaatggacggtgccgggccgtggcagaacttcaccaaaatcaccttcccgctgctgatcaaaccgctcacgccgctgatgatcgccagttttgcctttaactttaacaatttcgtattgattcagttattgactaacggcggcccggatatgatcggcaccacaacgccggcagggtacaccgacttgctggtcaactacacctaccgaatcgcttttgaaggcggcggcgggcaggacttcggcctcgcggcggcaattgccaccctgattttcatattggtaggcgcgttagcgatactgaatctgaaagccagcaaaatgaattttgattaaggaggagaggcagatggccatggttcaacctaaatcccagcgtttgcgtctattgggtacccattttctgatgctctgctttatcgcgctgattatgttcccgttattgatggttattgccatttcactgcgacccggcaactttgctaccggtagcctgattccagaccagatttcctgggagcactggaagctggcattggggatgagcgtgactcacgccgatggcagcgtgacgccgccgccgttccccgtgatgctgtggttgtggaactcgattaagatcgcggtgattaccgccgccggtattgtcaccctttccaccacctgcgcctatgcctttgcgcgtatgcgtttcaaaggaaaaagtagcctattgaaaggaatgctgatttttcagatgttccctgcagtgttgtcactggtagcgctgtatgcgttgtttgaccgactcggccaatatttaccgtttattgggctgaatacccacggcggcgtgattttcgcctacatgggcggtatcgcgctgcacgtttggaccattaaaggctattttgaaactatcgataactcgctggaagaagcagccgcgctggatggtgcgacgccctggcaagcattccgattggtgctgttgccgctgtcggtaccgattctggcggtggtgtttatcctgtcgtttattgccgccattaccgaagtaccggtggcctctctattgctgcgagatgtgaacagttacacgctggcggtcggtatgcagcaatacctcaatccacaaaactacttgtggggtgacttcgccgcggcggcagtcctgtcggccattccaattaccgcggtgttcctactggcacagcgctggctggtgggcggattaaccgctggcggggtgaaaggttagtcagaatcgttttgctggtacaggtgtctgtgtcgggtgactgcaccagttggttacaaagcatgccactgcttactttgctgtaatttaccctggtactgtgtctttatggcggcctatatggccgccattttttatgcctattattgtttactcgcgttttagtcgctcggtattggccagatataacgtcaccaccagcagcagaatcgacgccgaatacaccagcgtatcaatagggttctcgtgatcgacaataatcagccggataatggcagttattccgatatagataaaatagcgtagagggaagtgataacctgactcaaagtacttcactatcaatgcgataaactcgaagtacaggaagtagatcactattccttcgatcaacttataggatgaggtttcctgattattggtaaacaaaacctgcccaagatgaaacgtctctttaatcagaaagaccaccaaaatagcggccaacgcgatcaagccaacgtttaataaacgctgtagatttttagctacccattgagaacgcgaatttttcgccatagatacacccagagaaagagggggaaacagtctgaggctaacacaaggccaagcctcagaccgaaaaaaggccccttacatcagtaagaggccaataataagcacggatcaaagagctttagctctctagcttaacgccagttcttgaaacggttaatcaacgcattggttgagctatcgtggctggtcaccggcgcatcatccgccagctcaggcagaatgcggttagccagctgtttgcccagttctacaccccattggtcgaaggtgaagatattcaggattgcgccttgagtaaagattttgtgctcgtacagagcaatcaacatccccaggctgaacggagtaatctcgcgcagcaagatggagttggttggacggttgccttcaaagactttgaacggtgcaacgtgcgccacttgctccggcgttttacctgcggcggcaaattcggcttccacttctgcccgcgatttaccgaaagccaaagcttcggtttgcgcgaagaaattagacagcaacttagcgtgatggtcgctcagcggattatggctgatagctggcgcgatgaaatcgcaaggaaccaatttagtgccctgatgaatcaactggtagaacgcatgctgaccgttggtgcccggctcgccccagatgattgggcccgtttggtaatcaaccggattgccattacgatccacatacttaccgttagattccatgttgccctgctggaagtaagccgggaaacgatgcatatactggtcatacggcagaatcgcttcggtttctgcgccgaagaaattgttgtaccagatgccgatcagtgccaatagaaccggaaggtttttctctgctggagtttcggcaaaatgacggtccatagcatgggcaccgctcagcaactgctcgaaattctcgaatccaacggacagagcaatagacaggccgatagcagaccatagtgaataacggccgcctacccagtcccagaactcaaacatattgtcggtatcaataccaaactcggctacggctttaccattagtagacagcgcagcaaagtgttttgccacatgcgcttcgtcctgtgcagcagccaggaaccagtcgcgagcgctgtgcgcattggtcatggtttcctgagtggtgaaggttttagatgcgaccaggaacagcgtggtttccgggttcagcggtttcaacgcttcggccatatgggtgccgtcaacgttggaaacaaaatgcatattcagatgatttttgtacggccgtagcgcttcggtcaccatgtaagggccaaggtctgagccaccgataccgatgttcactacgtcggtaatcgctttaccggtgtaacctttccattcgccgccgatcacgcggtcacagaactgtttcattttagccagcaccgcgttcacttctggcattacgtctttaccatcgaccagaatcggggtgttgctgcggttacgcagggcaacgtgcagtacggcgcgatcttcggtacggttaattttttcaccggagaacatggagttaatcgcaccggccagatcggtttcttttgccagtgcctggagtttttccatagtttcagtggtgatgcggttttttgaaaaatctaccagcatctggtcgtcaaaagtggcagaaaatttctcaaaacgctgcttgtcctcggcaaacagatcgcggatttgcacatctttcatctgttcaaagtgttgttctaacgctttccaggcagcggtttgactaggatttacatttttcatagcgacgctcttctaggcttaaggataatgaaacgaatgcgttaattgtatcctgttaacctgtgattgagatctcttttcttgcgataggtaataactctcgatcagaaaagatccccattccctttttaagggcaaaattcctatacttcaggataacaacctgttactgaggttgtgtaactgtcacaggtatgtggcagattaaaacatacccacttttgcttaagattaaaaaggttgtcgctatggaattatctcccccgctaatgttggtggtgattggtctgagttcattattggcgcagtgggtcgcctggttattacgcttaccggcgattcttccgctgttattgatgggtattgtacttggcccgctggtgcactgggtgcagcccgatttgctgtttggcgatttgctgttcccgcttgtttccctgtccgttgccatcattttatttgaaggcgcgttaactctgcgagtggaagagattcgcggtttgggcggcgtggtacgcaatctggttaccgtgggaatgttggtgacattttcggttatcagcgtggcctgttggtggctactgaatttccctccagaattggccgcgctaatcggagccgtcacagtggtgaccggcccgacggttattgctccgttaatgcgagtggtgcgcccaaaatctacgattaatcaggtgctacgctgggaagggattgtcatcgatccggttggggcgatattcactctgctggtttttgaatttattgtcctgaaacagaatgcagaatcttacactcacctgttctggacgctgggtattaccgccgcggtgggtttgatcgccggcgcgctatttggctatttattaggattggcgctgcgccgcgtctggctacctcgctatttgcaaaacctggcggtactggcaattatgttggccgcgtttggtatttctaacgccattgccgatgagtccggcctgcttaccgtcacggtaatgggcatctggctggcaaatatgcgcgatgtcgataccagcgatattctggctttcaaggaagaattatctgcgattctgatttccgctctgtttattattctggcggcgcggttggatattcatgctctatggaacatgggttggccgctactgattttactggcggtagtgcagtttattgcccgtccgctgtgtatcgccgtttcgacctggcgatccagtctccattggcgcgatcgtctgctgttgtgctggatcgctccgcgaggtattgtcgcggcggcggtcagctcattatttgccctaactttacagcgtaatggctacgaaggagcggataagctggttacggtggtttttgcgattattatcggcaccgtcgtgctgcaaagcctgaccagcggaatgatggcgcgctggctgagggttcagcagcagaagccgcgcggcgtactgattgtcggggccaatagcgtggcgcgcatgctggcgcaggcgttgcttaaactgaatattccagtgctggtcacggatagcagttgggaatattaccgcctggcgcgtatggaaggcattccggcctattatggtcacgcttactcagaacatgctgaaaactatctcgatctgagcgaaaccgcgcaggttttggcgctatctcccaatcgccaccagaatgcgctagcggtgtaccattttggccatatctttggcgatagccatgtgttcgccattcgttccggcacgctacaaaaagggcgaaccaatgcggaaagtagccgattccgccgccacgaagtgctgttcgcgccagaagccacttatggccgcttaagcagccagattgccaaaggtgccaccatcaaagcgaccaaactcagtgaaaactttggctggctggaatatctggagaaacatcagggcattattccactattttatcagcgggaagacggcactttgcagccaattagtgccggcgtggctcccgctgtgccctgcactttgatagccttggtacaggacgataattcatcggcaagccgctgattacccaagaaatcacttcaaccagagggaaggccaggcgtcttccctttttattataaaattgacgaataagcgctcggtcagaaaaaatttttattgttaacaattggtgacatcgttggaaaaaccgctattttgcagataatcccaatacattgccctcgccacgccacagattcccccactaggctgaaaaccggcagtatgaaggtgaaaaaacctcattgtgccgccgttgacagcggcccgagaacccgttattcctaaacacctacttacgcagcattgcgtaagccagaagaggtgcgtcgcccaggtagagtgtcggaggagccgtaatccgctgaagacatttgagggggagcgacgccgagacgtgatgacttcggctatcaccacgtcgactacaggggctgaatcccctgggttgtcaccggaaaccgttcatttagaatggttagcaaggtggagcgcttctgggtgtaccctagcgtaactcttatgcttgtgccccctgtctcccgctcttcccttgtgccaaggcttatgtatttagatgaccaccctgcgcggtgcatccctgacacgaggttttttagatgattcatgcagcatcccaacaggctaccgtcgtcgccaaatttggtggaaccagcgtcgccgattttaccgccatgagccgcagcgctgacgtggttctgtctcatcccgatgttcgcctggtcgttctctcggcctccgccggtgttactaatctgttggtcgcccttgccgaaggttgcgagccagaacagcgcgcctttcatctggatgaaattcgccatattcaatatgccattctcgataacctgaaagaatccagcgtagtacgtgatgaaattgaccgtatgctggacaatatcgccatgttgtccgaggccgccagcctggcgacatccacggcgctgacggacgaattggttagccacggcgaactgatgtctacgctgctgttcgttgaaatcattcgccaacgcgacgttgccgtggaatggttcgacgtgcgtaaagtgatgcgcaccaatgatcgctttggtcgagcagaacccgatactcaggcattggccgaactggctcgagcccagctggcgccgcgtctggccgaagctattattgtcacccaaggctttatcggcagcgaagctaaaggccgcaccaccactcttggccggggcggcagtgactataccgccgcattgctaggtgaagctttgagcctcagccgcgttgatatctggactgacgttccaggcatttacactacggatccgcgcgtggtgcctcaagctcagcgcatcgataaaatcgcttttgaagaagccgctgaaatggcaacttttggcgctaaagtcttgcatcccgccaccttattgcccgccgttcgcagcgatattcccgtgtttgttggttcgagcaaagatccggccgccggtggcaccttagtctgcaataaaaccgaaaatccgccgctgttccgcgcgctggcattacgtcgtaaacaaacgctggtgaccctacacagcctgaatatgcttcacgctcgcggttttctggcggaggttttcaatattctggcgcgccataatatttccgttgatttgatcacgacctcggaggtcagcgtggcgctaacgctggataccactggctccacgtcaaccggcgaaagtctgctgaccacgtctttactgaccgagctatcctccctctgtcgggtggaagtcgaggaaaatctggctctggtggcgattatcggcaatcagctttctcaggcttacggcgttgggaaagaagtatttggcgtattagatccattcaatattcgtatgatttgctacggtgccagcagcaacaatctgtgcttcctggttcctggcgacgatgccgaacaagtagtcaaaaccctgcaccataatctgttcgaatagataataacaatcagccgggtggataccgcccggcaccttctctgcacaacatcaccagataacaggacatcgcatgcttgccaaagtcactcgcttgttcccgctctggccggttttactgtctatcgctgcctattacactcccagcacctttacgccgatcggcccctatatcgggccatgacttatgctaatcatgtttgccatgggcgtaacgctgcggttagaagacttcaaacaagtgctttcgcggcctgccccggtggctgcggcaacttttttgcattatctgattatgccgctggcagcctagatactggcaatgctattccgcatgccgccggatctttccgctggaatggttttggtaggttagcggaacagcatctaacgttatgatttatctggccaaaggtgatgtggctttatctgtcactatctctgcggtttcaacgttggttggcgtattcgctacgccgctgctcacccgtttatacgtcgatgccacaatcagcgtagacgtaatgggtatgctgaaaagcatcctgcaaatcgtagtcattccgataactgccggattggttatccatcactgttttaccaagacagttaaacgtatcgaaccctacctgcccgctctctcgatggtatgcattctgaccatcatcagcgctgtagttgcgggtagtcagggacatattgcatctgttggattcgtggtgattatggccgttattctgcataacggtatcggcttgctcagtggctattggggcgaaaaactattcggctttgacgaatcaacctgccgcacattagctattgaagttggtatgcaaaactctgggctagcggccacattaggcaaaatctacttctctccattagctgcgtttccgggggctcttttctccgtctggcacactctttccggttatctcctcgccggttattggtcaggacgagcaatcaaaaaagcagcatcaaatgataaattaactaaataaagttgtcgtacccgataaatttcaggtgcgttctcgatctaaatacaaagacttacgcgcgtttaccttaaatgtcctctacgaaatttcacattcccatctgcacgggttgtcagctattaccatttcccctattatccaccccatagaaatgagttaggattcttctgactacaaagaataagattaatagtaaaaacaaaattaatctttataagaaaaaataatacttacttttcaatttttataaattttacaaacaccatggaattaacccttctaaaaagagtcattccatttagtcattctacgcatttaataagtcattaattatctgcgccaacatcgcagataaaggctacctgaaaaaggtgaactgacgcttcaagccatttgaggcttctctgttatttgctatttaaccttttcgagcaagaggtagtcttgccccgacgcattaaataaaggacagaaacagtaccaacgtctttatatggcgtgacagactgtctctcataataggattaaatgattaaaagatactccgcatttttattgcttttgagcgccagcgctcaggggaatactttgcctaatatgggtgacttctcccctatgagcgaatctcgtcgtgcattgcaggatagctcgcgtaccgttcacgaaataatggatgaacgtcgctaccaacagttaaagaaacaaaacctgttggattccgaagctgaaatgcatcacatggctttacctatgtcggcgcaatgtttaccgatcaatggcgtttatttacgcggcgtcactctattaaaaaacagtgacttagaatcgatcgctactttacctgaaaattgcatcagtagtaacgatattaatcaacttacccgtgaaatcacgcacttatatataagcaaaggttacgttactgccagagttcaatttatccagcctaatcaggatggtgaactgggtattaatgtcaccgaaggttttatcgagaaaattatcggtggtgaccactgggttaatagtgatttattatttcctgatttagtcggaaaaccgcttaatctgacacagcttgatcaaggattagatcaggcgaacaggctgcaatccaatacaactaaattagatattttacccggtaaaaaagacggtggttctattgttcgattgaacaatgtacataccaaatcatggcttttatctggaagtatggataattacggccagaaaaataccggaaaatggctggctcggacttctgccagttatgatagcccattgggtttatctgacttcgttagcttaaatgtcagtagcacattaaaagatccgcagcagcgctatagccgtgcctacaccatgctgtattccataccttacggtgcctggacatttagcggatttgccagtttctctgattatttaaatcatcagaaactagcgattaataccgttaaattagacggaaatacaaaacaatacggcctgcgtacggattatgtgtttcaccgggatcaagaccaaattgactcactgagcgcacaacttacctacaaaaacgttaataactattttgagtcatccaagctacatatcagcagcccaacgctgacggtgctggaattgggtgccagtcatatgcaaattctaccgcgcggcctgcttagcctgaatgccacggtagagcaaggcatgccgtggtttggctcagagcggagtagtggccgcaaacctgccggttatccggacgcacagtttaccaaagccaaggttttcgccagtttaagccagcgctttaccctgtttgataacccgtaccaattgactaactcgttctacggccagcacagcaaaaactctctaccgggcgtggaatggatcagcctgactgaccgcagcgcagtacgcggctttagtcatagcaccctttccggcgataacggttggtatctgcaaaatacgctgtctcgcacagttccagtgggcaataccacttttactccacgtttaggggcagatgtagggcgagtacaggcacgtcttagtcagcaaagctggcaaagcagcgcaggcctcagcgccggagtgaccttccgttatcaacggtcattaattgatgtggaagccagccgtggctggattctttccgagcataaaacccccgttgatccggtacaggttctggcccgtttctcgtacaccttttaacgatccttttattgattaataacaccagtagttaacgttataaaaacggaaatatctaggagatacacggatgaaaactaaaaaattcaaactgtcacccgcaggaaaactggttgcctctttggcgattattttcgcctcattgggtgcagcctacgccgccgatatcgtcggggccggtgacgcagcccataacccaaccatcagcagcgctgccaacggcgctgcggtagtcgacattgttgctccttcagcatcaggtttgtctcataaccaatacgatagctttaacgtcaataaacccggcgcagtgctaaataactccttaaccgacggcacctctcaactggccggtcagcttaatgccaacgccaatctgggcagtaacgctgcaaaaatcattctgaatgaagtgattagccgtaatccttctttactattagggaaacaggaaatcttcggcatggccgctgattatgtgcttgctaacccgaacggtatcacctgtgatggctgcggttttatcaataccaaccgctcttcgttggtggtagggaatccgctggttgaaaaaggggagctgaatggctttaacaccttcaacaatacccatgcgctctcaataggcaaaggcggactggatgcggatagcgctctggatctgattgcaccacgcatcagcgccgaaggccatatttcctcaccggagcaggtttatgctctgaccggcgaaaaccgtgtctcagccaaaggcgagattctggaaagcagaaacactcaaaaagcgggcgcattagacagctactaccttggtagtatgcaagctggccgtattcgcctgatcagcacagccgaaggaagcggtgtcaaaatcggcaatgaaatcgatacctttcgtttagctaacggtcaggtcaccgttggggatatcgatgttgcatcgaaaggcaatctcgagttagaggcagccaaattaaaaggcgccgatatcagattaacgggtaaaaacatcgtatccaaaggcaaaatcatctccgatagtcacagccgtaatgatagcgataactacgatacctggtggagcggcaaatacgttaacaaccgcgatagcagccagcgccttcaggaaaccagcatttcaggtaatgatatttcgattgttgccaagcaaaacaatacgctgaccggcgcatatgtccaaggccgcgatgtcactctgcaaggcgctaaccttaagctagatgggcaaaaactcacacaaaccgacggccatactgataatcgggatcgtggtgcctggcgtcgcaataccaataaagaaaacgagaaagttgaacaagttggcactgagattcatgcacatcgaaatgcaaaattaatggctgacgaaggcgatatcgtgatcagcggtagccaggtctatgccaacaacgatctcagcatcaatgcaaaaaacgatctgcatctatcgggtttaactgaatcacaaaccgtccgcgaaaatggcaaacgtaaaaatgacaccagcaaattactgacgggtagctggtccaatagcactacgacggaaaatcttaaaaccgcaaaactcaacgccgtaaccggtaatttaggcctctccgcgggcggtaatatcaccagtaaaggcgcggaagttcgagctaaaaaagacctgattgtcaccgcagacaaacaaatcaatatcgatgtacagaaaacagccaaccagaaaaccgtgaagaacgatatcgtggtttggggcggtatcggcggcggagatgataaggataatggcaataagaaagaagtcagccatgcctctgatttttctagcaatgggaaacttctggtatccggtaatcaaggcgttaaggttactggtagtaaagtcaccgccaaagaaggcgcattcgttgaaaccaagaatggcggtctggtcattgataacgccattagcttaaccaccgagaaagtggatcaacgcaccggtaccgttttcaatatcactaaagattcgaagaaagcgaataactctaccgagcaatctaccggtagcgaactgaaatctgatgcagatttaaaactgtttagtcagcaagatacgactatcgttggcagtctggtcaatagcgccgatgagttagggattaaaacgctgggcaatctgaatgttaaatcagccgttgaacagcaaaagattgacgaaaaaaccacatcgctgaaagtcgatgcctatgccaaagaacatagcgataaacaatatcgtgccggcctgcgcattgagcataccagcgaaacagaaaaaaccgacagcaccaagaataaagcggcaaccctcagcggcggcagcgtaaaaatcgaatccgataaagacgttacctttactggctcgaaactggaaacgaccaaagacgacgctaaaatcagcggtaataacgttgcttttctggctgcagaagacaaaaccaccagcgacaaaaccagcacaaaagttggcggcggcgtttactacactggcggtattgataaagcgggcagcggtgtagaagttggctatgaaaatagcaaaactcacactgacgcgaacaaagccgcggcatccagctccaacgtagcgggaaactttaccgttgaggcaaaaggcgatctgaccaaccaaggcactcagcataaagtgggggagaaactgacgcaggaagcagcgaatgtgaataacctcgcagctaaaaataccaaaaacagcaaaactgaaacgttaacaatcggtgctgaagtcggcgctaacgttgattacagcggcattactcgtccggcagaaaaagcgattgataagattgctaaactggacattctcggtgccgctaacgatttgggtgatattggcctgccgaaccttggtatcgatgtcggagccaacggcagcagcagcgatgtcactaaaaacagctcaaaagcgctcgttacttccgttcaggctggcagcgttgccacgaaaaccacaggcacagtgaaagatcagggcacgcaatacgaagccactaaaggcggcgtaaccattgaagcccaaagccacaccagcgaagcggcagccaatactgaaaccgttaatagccgtgagaccaaaggtaacgcagatctacgtgtttatacctccactggcagcgatatcagtgccgatgctaaaggcgaaggcggtactacccgtagcgaaaaagacgccagcaacgcggtcaccggcaagattaaagcggccgatggcattagtatcaaggtcaaagaggacgcgacttatcagggcacctctctggacgcaggcgcgggtaaaaccagcgtcaaagccggcggggacatcaaattcgatcaggccacggataccagcagcgagaaccataaaggctttaacgttaagctttctgccaaaggcggcagcacgccagagagcaacaacttcggcattggtttgggcggcggtatagacaacggcagcagcagcacttccgatgccaaagtgagtcagttggcgggtaaacaaggcgtagaactggattccggccgtgatttaacgctgaaaggcagccagattggtagcaaagagcagccaaccggcaatgtcacgctgaaagccgcgggcaaggttgatttgcaagcagctgaatccaccagcagcaaggaaaataccaagctgtctggcaacatcaatgtcggcaccagcagtaccgattctgaaaccaagagcggcggtggtttcaatctgggcggcgacgttaacttcgataaagttgatgaatcagccacgactcgtcagggtagtaaaatcgacagcaaagggacgctgaagattgaatccggcagcgatgacaaacaggctatccatttgcaaggcaccgaagtcaccagtaaagcaacggttctggatgctaaaaaaggtggcatagtgctggagtcagcgcaaaacgaagagaagaaaaacaactggaatttgggtctgaaaggcagcgcaggcatttctcaatcttatgataagaatgacaaaggcgtagtcgacagcgaatctggcaaagactctcataacgttagcgcgggtatcaacgtcggcgttgagaaaaaagatgcggttaaacaacagaataccaagattaataccggtaatctgacgttgaacagcggaaaagacaccacgctggctggtgccacagtgactgcggataaagtgagcggggatgtaggtggcgatctgcgtgtcgaaagccgcaaagatcgtgaaaccggtgtcaacgttggcgtggatttaggtttaagccacaccaataaaaaagaagataatctggtaactcgcgtttctgatgccagcccggtagggaaggaaaaaatcaaaaacgccttggaaaccaaagctaacaaagcctttgataaggttgaagataagtacaataagttcgctcacaaaaacgaccctaagcaagacaccaccaatgccgtgagctttagtaaagccaacgataaagtgaccttgccagagaaattggttgaggaaaaaactgacagcgcggtttgggataaaggcgctcgttgggcgggtaacaaagtgaaaaacaaagtcgttggcccggcagaagaaattggtctggatggtcacttcaaagttaacgctaacgtggtaaataacgatgccattaacgaaacctcagcgatcagcggtaaagaaggcgtaacgctgaacgtgaaaggtaacaccttgttaaacggcggaaaactgagcagtgatcaaggcaaagttgaactgaaaaccaaagctcttgagttacaggaagtcaaaggtaacaactatcagggcggcggcggctttaaccttgcgccaaccgtttctggtttgctcaccggcggtgcgaaagatgtattgagtggcaacactccgtttattcaggcccataccaagtctgaaaaccgtgatgtaaagggtggaattgaagaaggcaaaaaggatgataaggctgaagaaaccgagtaatcaaagctgaatcaaaggggttttagggacattatctgcgcctaaaaccccacctgaacatgaaaaaccggcgctgcctatctggcacgccggtttcttttagcactcacactcatttatcaatctgcatcgtaacccagattaggggccagccagcgctcgacttcggctatcggcatcccttttcgcgccgcgtagtcttctacctgatctcgctgaatctgcgctacggcaaagtatttgctttctggatggctgaaataccagcctgaaaccgaggctcctggccacatggcgtaggattcagtcagtttcattccggtgtgagtctccacgtccagcagcttccagatttgccctttttccgtgtgttccggacaggccggataacccggagccggacgaatcccctgatagttttcccgcaccaattcttcattactcaggttttcatttggcgcaaagccccagtacaccttgcgcacccgctcatgcagatattcggcaaaagcctccgccaaacgatcggataaggctttaatcatgattttattgtaatcatcatgctgagcatcgtaagcctccgccagagcatcttcctccagtccaccggtcacggcaaaagcgccgatgtagtcagctttaccgctggtttttggcgcaacgtaatccgccagacaataattagggaagtcatttttttccgtttgctgccgcaaatggtggctcaccagcagcacgtcatcgcgacgttcatcccgataaatctcaatatcatcacccacccgattggcagggaacagacccaccacgcctttaggatgcaatgatccttctgatgagagcttatccagcatctgatttgcatcagcaaacagacgcttagcctcttctcccaccacttcatcttccaaaatgcgcggatacttgccggccaacgaccaggtcataaagaatggtgtccaatcgatataatttcgcagtgtttcaatgctggcttcgacctgctgaaccccaagcttatggactaccggcggcgtataattttcccagtcaatcaccgtagcgttatcccgcgcagcttgcaggctgaccggcggcgtccgcggttttttacgcgcatgctgaatacggacggtttcatactctttgcgagttttagcaataaattcgtcccgttgcgcgtccgaaagcaacgccgataccaccccaacactacgagaagcattagaaacgtaagtggttgagccgctgtagttttgctcaatcttaaccgccgtatgcgctttggacgtggttgcgccaccaatgagcaacggcaaggtaaagccctggcgttccatctctttggctacgttaaccatttcatccagcgacggggtaatcagaccggataaaccgataatatcgactttttcctctcgcgcagtgcgcaggattttctcggttggcaccatgacacccaaatcgataatttcgtagttattacactgtagaaccacgccaacaatgtttttaccgatgtcatgcacatcgcctttaaccgtcgccagcaggatcttgccggcggtggtgcctttctgcttactggcctcaatataaggttccaaataggccacggcctgtttcatcacccgggcggatttcaccacctgtggcagaaacattttgccctcgccaaacaaatcacccaccacgttcatgccggccattaacgggccttcaatcacttcaatcggtctgtcggcttcctgacgagcctcttcggtatccagttcgataaattcggtaatgcctttcaccaacgaatattccaaccgtttcaccaccggccagcctcgccattccgcctgctgcaccgcaacttcatcacttttgctgccacgaaacttttcggcgatatccagcagtcgctcggtgctgtcattacggcggttcagaatcacatcttcaaccgcatcacgcaattcatcggataaatcgtcgtaaattgccaattgacctgcgttgactatccccatatccatgccgctgcgaatggcgtaatacaggaaaaccgcatggatcgcttcacgtaccgggtcgttgccacggaacgagaaagaaacgttggaaacgccgcctgaaatgagggcgtgaggcagctcgcctttaatatccgcacaggcctcaataaaatcaacggcatagttattatgttcttcaataccagtagcaacagcaaagatatttgggtcaaaaataatatcttccggcgggaagccgacggtttccgtcagcagcttataggcgcgacgacaaatctcgattttgcgcgcgcgagtatcggcctgcccagcttcatcaaaagccatcactaccatggccgcaccgtaacgacgtaccaatttagcgtgatgaataaaggctgcctcgccttccttcatcgaaatcgagttaacaattcctttgccctgaatgcacttaagccccttttcgatcacgtcccatttcgaggaatcgatcatgataggtacgcgggcaatatccggttcaccggcaatcagattcaggaaacgcaccatcgccgcttccgcatccaacatgccttcatccatattgatatcaatgatttgcgcaccgctttctacctgctggcgagccacatctaaagcttcagcgtatttctcttccttaatcagccgtttgaaacgagcagagccggtcacgttggttcgttcgcccacgttgacaaataacgtattggcatcaatggttaagggttccaacccagccagacggcaggcgaccggaatctgcggtaatgcgcgcggcggcatgccagcgacggcttttaccatcgcggcaatatgacgcggcgtagtcccacagcagccaccaacgatattcagaaagcctgatcgcgcccattcagcgatatgctcagccatttctttggcgtccagatcgtattcaccaaaagcattcggtaagccagcgttgggatgagcactaacgtaacactctgaaattctggataactcagccacatactggcgtaactcatccggccccaaagcgcagttcaggccgaatgacagcggttttacgtggcgcaatgaattataaaaagcttcggtggtttgcccggaaagcgtgcggccagaggcatcggtgatggtgccagataccattaccggcagcaccacgcccaaggcttcaaattcggtttctaccgcaaaagttgcggctttggcgttcagggtatcgaacaccgtttcaatcataataatatcgacgccgccctccaccagcgctcgggtggattcgcggtaggcttccaccaattgatcgaagctaacgttacggaaagccggatcgttaaccttgggagaaatagaggcagttcggttagtcgggccaagcacaccggcaacgtagcgcggtttatccggcgttcgggcggtccattcatcggcgcagagtcgggctagtcgggcggcctcgtagttaatctctgccgagagcgactccatttgataatccgccatagcaatggtggtggagttaaaggtattggtttcaagaatatccgcaccggcttcaagataagcattgtgaatggcggtaatcacttcgggcttggagagaaccaatagatcgttatttcctttcagatcgctcggccaatccgcaaaacgttctccgcgataatcggcttcttccagacgatagctctggatcatggtgcccatgccgccatctaatactaaaatacgttttgccagctgctggtgcagtttttctactcgatttgtcactgtcgcctcttcgcctcgatgccctgccaaatatcatcccagcccatatttcagagccgtttaacctatcggaactgctgcaaaagccagcaagccatcctagcacaagttataaggctaatgagtcgacgggaagttgagactttttcaggtagaaatctgcacacatcggatgagcgttttggcccattagcatgcataattataaaacgaaaatgaattccattatatttccagggagctgatttatgacgataccgattcccattaaacggggaaagaaaacaaaggctagtggagctacatcagcagcggctaccggtcaggttcaatcattgactcgcggccttaaattactggaatatatttccgaatcccaaggtcaggttgctctgacggatctggcacaacaggccggtttacctaattcaacgactcaccgcttgctgactactatgcaacagcagggcttcgtacgtcaggtgggagatttagggctgtggaccatgggcgcgcaagcgtttgtcgttggcagcagctttttacaaagccgcaatctactggccatggtacatccgattctgcggcgtttgatggatgaatccggcgaaaccgtcaatctggcggtattggatcacagcgattatcaggcgatcattatcgatcaggtgcaatgtaccgcgctgatgcgtatgtctgctcctattggcggtaagcttcccatgcatgcttccggtgcaggaaaagcgttcttgtcgactctgtcagatgaaaagctggtgcagctactccataaaaaaggtctgcacgcctacacccaacacacccgcacgaatccggtcagtttaaaagagaatttggcgcaaattcgcaagcagggctattccttcgatgatgaagaacatgcgctgggcttgcgttgtatcgctgcctgtctgtatgacgaacatcatgaagccttcgccgctatctctatttctgggccggtttcacgcatcaccgatgaccgcgtgaccgagctaggggcgctggttattcacgccgccaaagaaattacgcaatcctacggcggcggtaatcgctaagtaaaatgcctcactcgcgcgccgctagtggggcaaaaatcaccctataatccgttgtgagaagcgctgcttacgccgataggcgaaaacatcctccacatgcccatgacgaatacgctgttgcaaaccgcgccagtattcagcgtggaataaatcctcgtgcatctcttcaaagcaggctctgacttgcggatcgctgcaaagaaaatggcggaactcttcaggaaaaacatcatttggagaaacgctgtaccaaggctcgctagccatttcgtcctccggatagcgcggcggaggaatatcacggaaattcacttcggtcatataacaaatttcatcgtaatcgtagaaaacgacgcgtccgtggcgcgtgacgccaaagtttttaaacagcatgtcgccggggaaaatatttgctgcggctagctgttttatcgcattgccgtattcttcaatcgcgtcccataactgccgctcattagcctgctccatatagatattcagcggtatcatgcgccgctccatatacagatgcttaatcacaatttggtcgcctaaatcttccagtttttccggcacttccagccgtagctcggccagcagttcctgactgatacgattcttatcgataacaaaattttcaaattcctgagtatccgccatgcgcccaacgcggtcatgctctttaactaactgatagcactcctgcactcgcgcctggctgacctctttttgcggagcaaactggtctttaatcactttgaatacccgatcgaaggacggcaaagtaaataccagcatgaccatgcctttcacccctggagcaacaataaactgctcatcggattgatgcacataggtgagatattcgcggtagctttcggtttttccgtgcttttgacagcctatcgccatatacaattcggcggtagatttgcccggtaaaatttcccttagccattccaccatcgccgctggcaacggggcataaaccatgaaataggagcgagcgaaaccaaacacaatactggcctcggctttgctggtcaggcaggtgtcaataaataatgctgccgattcattgtgatgaatcggcagtaagaacggatgtactccgtcagacaatctgagctttcccactagccacgccgctttattacgataaaacagttcgttggcaatctggaagcgagcggtagccagttgctgcgggctaaatgcctgttggagcgcagcaacgatatattcaatgtctctgggcagattttcccaaggtaaacgaaggggtaaatcattcaatatcgtctgcaacatcgcagataaaccctgctctggcgtaaaatcccgcgccaatggccgtggaatatcgcgaaaacgtcgttccggctgggagctgaaaacaaagagcttgtcctgagttaactcacggtgtttaaacaggcggcaataaaccgagttaaaaaagctttcggctatttcgaaacgtggataatccggcaatagatcggtatagatagcttttacccgcgccagaaattcggcgtcaaaacttccgctgccggtaatgcgttttagttgctccaccaccagtccaacgtggtgatcatagagatgaattcgctttttcatggcttgctgaatcgcttgccagtcggcctgctcaaagcgctgctgagcgcctgcggtcacttccagaaagcggccatactgtgcatcaaaaccctgcaaaatagtttgggcgattaactgctctaagcttattgccatgctcacctcccgctacacggaacagagcctgcatacgcaggctccggttaacaatgattgctagttcggcagtaggattagaactgctgctcttctgtcgatccggtcagcgccgttactgaagattcgccaccctgaatgatattggtcactttatcaaagtaaccggtccctacttcctgctgatgggaagcaaaggtatagccacgatccaccgaggcaaattcaggctgttgcactttctctacgtaatgcttcattccttcgccctgagcataggcgtgcgccaggtcgaacatgttgaaccacatgctgtgaataccggccagcgtaataaactgatatttgtagcccattgcagccagatcttcctggaagctggcaatttgcttatcgctaagattctttttccagttaaaggacggcgagcagttataagccagcaatttacctgggaatttagcgtgaaccgcatcggcaaaacgcttcgccagcgccaagtccggcgtagaagtttcgcaccacaccaaatctgcataaggggcataagccagaccacggctaatcgcctgctcaataccggcgtgagtgcggaagaagccttcggcggtacgttcgccgctgataaattcacgatcgtaaggatcgcagtcggaagtcaacagatccgccgcatcagcatcggtacgagcgatcaataaggtcggtacacccaatacgtccgccgccaagcgcgcagcaaccagtttctgaatagcttcctgagttggtaccaataccttgccgcccatgtgcccacatttcttcactgccgccagctgatcttcgaagtgaacgcccgctgcaccggcttcaatcatggctttcatcagttcaaaagcatttaacacaccgccaaaaccagcttccgcatcagccacaatcggcaggaaataatcggtataaccttgagtacccggctcgatattattcgaccattggatttggtcagctcggcggaaactgttattaatgcgtttaactacggcaggaaccgaatctaccggatataaagactggtccggatacatgctggatgcggtattggcatctgccgcgacctgccaaccggacaaataaatagcttccacaccggccttagcctgctgcaaagcctgaccgccggttaatgcgcccaaacagttgatgtagcctttacgagcgccaccatgcaataaatcccacagtttttgcgcaccgtgctgcgccagcgtgcattccggattgaccgagccgcgcaatttaatcacttcttcagcgctgtaaggacgggtaatcccttcccagcgcgctgatttccagtcttgttccaattgcttgatttgttgagcacgagaggtagtcattgttcttatccttattattaatttgtagggttatgccagcagcgcgtagccaggcagggtcaggaagtcgatcagctcgtcttgtgttgttatacgttccatcaactgagcggcttctttaaagcggccggaatcaaagcgttcggaaccaagctcttgcttaacaacctgcatttcttcactcaacattgtgcggaacaattctttagtgacttttttcccgttactcagggatttttggtggtgaatccattgccagatagaggtacgggatatctcagccgtcgcagcatcttccatcagtccatagataggtacgcagccgttaccggagatccaggcttcaatgtattgcaccgccacgcggatattggcgcgcataccttcttcggttctttcaccagaacagggctctagcaattcagcggcggtaataggtttatcctgtgcacgactcacttccaattgattcggacgattccctaatacgcgattaaatacttccatcaccgtatctgccaaccccggatgcgcaacccaggtgccatcgtggccattagtggcttccaattctttatcggctcggactttatccaacacccaagcgttcttctctgcgtctttactcggaataaaggccgccattccccccatagccaacgcaccgcgcttatggcaggtttttatcagcaggcgagagtatgcgctgaggaaaggttgagtcatggtgacggattgacgatcgggcaaaacgcgatcgctatgattcttcaatgttttgatatagctgaaaatgtaatcccagcgtccgcagttaaggccaacaatgtggtgacgcaggtgatataggatttcgtccatctgaaacactgcaggcaatgtttcgattaataccgtggctttaatggttccctgcggcaaaccaaagcgctgttccgtaaaggtaaagacgtcgctccaccaggcagcttcttggtaggactgcattttgggcagatagaaataagggccactaccattcgccagcaggtgttcataattatgtaagaaataaagggcgaaatcgaacagaccaccagagatagcttctccctgataagtcacgtgtttttcaggtaaatgcaggccgcgcactcgcgcaatcaaaaccgccggatttggttttagctggtaaatcttgcctgattcattggtataagaaatagttcctttcaccgcatcatgcaggttaatttgaccttcaatcactttatcccaactcggtgccagcgaatcttcaaaatctgccatgaagactttcacattagcattcagcgcgttaatcaccattttgcgctctaccgggccggttatctcaacccgacgatcctgtaaatcagcagggatattctgaattttccagtcaccattgcgaatggaagtggtttccgaaataaagtccggcaatccgccattatcaatgccatgttgccatttctcgcgtgcagcaaggagttgacagcgacgttctgagaattcagcaaccaattccgttaaaaactcgatggcctgagcggtcaatacctgacgctccgcagtggaaaacttctgcgtgaagactaactccgtgcctactaactgttgtgtcattaccctttcctcatcccaatctgacggcatatacaccaacgcacaagcggcgtacttaccgcctgagacgcattttatgagtcattggcggcaagattttctggtcgtttttcaccccaacagaattaagaataatcaattaatcatgaaaatcaaaaacgatttccatttttatattaaatatttatttaatctttatttatcaattgattaacacaaataacaaaatacacacttcaggaaaggcattccataaatgacaaaattccgttgtaacatattgtttaatatagagattagaccagttggaaagggattgtttatgcagaatagcagaagaaatggttaggcggcatcgattcagccgccatataaagatgaaatcagtcgagagtcgggttcatttgacgtagatcgaacggcgtaatctgatagacataataattgagccaattggcaaataataagtgtccatggctacgccatgaggctaatgggcgctgcgtaggatcattctgtgggaagtaattcagtgggacagcaggttccagacccgcagcccgatcccgcgcatattcccctgccagcgtatccacatcgtattccggatggccggtaacgaaagcgactcttttatccttactggcaaacagataagcaccggcctcatcggaagccgccagaatatccagatcggtgtattgctgcaaaatctcaatcggaaaatctgcataacgggaatgaggggcaaagaagctttcatcaaaaccacgggtcaataacgccaaaggtttcagggtttgatggcgataaatcccagacaatttttccttacgagttagtttgggaatcccatagagaatgtttaaggcggcctgcactgcccagcagacaaatagcgttgatgtcacatgatccttggcccaggtgataatgcgttctatctgcggccaataggcaacatcgctgaaatccactaacccaagaggagcgccggttacgataagtccatcaaaattctgatttttaatctcttcaaaatcgcaatagaagttattcagatgctccgctggcgtatttttcgattcgcggctatccactcgtagcaattgaatatccacttgcaggggcgagttcgacagtaaacgtaaaaactgattttccgtttctatcttcttaggcattagattcagcaccaatacttttagcggtcgaatttcctgagttttagctcttgatgaagtcatcacaaaaacattctcattacgcaagaaactcaccgcaggtagttcatcagggacccgaattggcatgcctacatcctcaatatatccgtttatacgtttagacttccagacacctgaagataactttttccaaatacaaagtcgagtgatcaacaacaacctgaaaatgtttcattgcggtattaaaccaatgcgctgctgtcctttacttccgcagcgcggcctcgcatttagcctgattgcaaaatcaccctcaatgataggaacaaataaccaaaaaacataaatattatttagctattggcgcaccagtgaaattggttaacatcgtataaagctgactaatcatgcatattaacaacaataaatagacaaaatcagtgagttatggtgattatgttggcaatattgcatcatcaaaggcgatacagccactcaatatcctagcaccggattaattaaaataattaatgcagttattctgggcgccagagagtgactcgttacttataaaaccaaggaagtattaagatctcaccaatggctctattttataaaggtttatatttataaggttgctagattgtggcgacaagtgacgccgataaatcgaggaaactactcagagagtactatatagatttagagaaagttaaaataggtgcgtattactgctgatattttgacaaatttcagatacaaaaaaggccatccgttaggatggcctcgtttgtttatttgatacctggcagtgtcctactctcgcatggggagaccccacactaccatcggcgctacggcgtttcacttctgagttcggcatggggtcaggtgggaccaccgcgctattaccgccaggtaaattcttttctaagtgccgaacttaaacccatataactggtgctgatacccagagtcgaactggggacctcacccttaccaagggtgcgctctaccaactgagccatatcagcacaactaaatttgatgcctggcagtgtcctactctcgcatggggagaccccacactaccatcggcgctacggcgtttcacttctgagttcggcatgggatcaggtgggaccaccgcgctattgccgccaggcaaattctgtttcaatcaacccgccacgtgatttacaccacacagccagtcaatccaatctgttaacaatgctgaaaatcaaaacgctctctaaaacaccttcggtgctgtaaggttaagcctcacggatcattagtactggttagctcaatgcatcgctgcacttacacacccagcctatcaacgccatagtctttaacgttccttcagggggcttgaagccccagggaagactcatcttgaggcaagtttcgcgcttagatgctttcagcgcttatcttttccgcatttagctaccgggcaatgccattggcatgacaacccgaacaccagtgatgcgtccactccggtcctctcgtactaggagcagcccctctcaatcttccaacgcccacggcagatagggaccgaactgtctcacgacgttctaaacccagctcgcgtaccactttaaatggcgaacagccatacccttgggacctacttcagccccaggatgtgatgagccgacatcgaggtgccaaacaccgccgtcgatatgaactcttgggcggtatcagcctgttatccccggagtaccttttatccgttgagcgatggcccttccattcagaaccaccggatcactaagacctactttcgtacctgctcgagccgtcactctcgcagtcaagctagcttatgcctttgcactaacctcacgatgtccgaccgtgattagctaaccttcgtgctcctccgttactctttgggaggagaccgccccagtcaaactacccaccagacactgtcctcaccccagattatggggccgagttagaacatcaaacattaaagggtggtatttcaaggttggctccacgcagactggcgtccacgcttcgatgcctcccacctatcctacacatcaaggctcaatgttcagtgtcaagctatagtaaaggttcacggggtctttccgtcttgccgcgggtacactgcatcttcacagcgagttcaatttcactgagtctcgggtggagacagcctggccatcattacgccattcgtgcaggtcggaacttacccgacaaggaatttcgctaccttaggaccgttatagttacggccgccgtttactggggcttcgatcaagagcttcgccttgcggctgaccccatcaattaaccttccagcaccgggcaggcgtcacaccgtatacgtccactttcgtgtttgcacagtgctgtgtttttattaaacagttgcagccagctggtatctgcgactggcttcagctccgagagcaagtctcttcacctagcgccagcgtgccttctcccgaagttacggcaccattttgcctagttccttcacccgagttctctcaagcgcctgagtattctctacctgaccacctgtgtcggtttggggtacgatttaatgttacctgatgcttagaggcttttcctggaagcttggcatcaactacttctgcaccgtggtgcatcgtcatcacgcctcagggttgatggttttccggatttaccaggaatacccccctacacgcttaaaccgggacaaccgtcgcccggctagcctagccttctccgtccccccttcgcagtaacaccaagtacaggaatattaacctgtttcccatcgactacgcttttcagcctcgccttaggggtcgactcaccctgccccgattaacgttggacaggaacccttggtcttccggcgtgcgggtttttcacccgcattatcgttacttatgtcagcattcgcacttctgatacctccagcagtcctcacagactaccttcaacggcttacagaacgctcccctacccaacaacacctaagtgtcgctgccgcagcttcggtgcatggtttagccccgttacatcttccgcgcaggccgactcgaccagtgagctattacgctttctttaaatgatggctgcttctaagccaacatcctggctgtctatgccttcccacatcgtttcccacttaaccatgactttgggaccttagctggcggtctgggttgtttccctcttcacgacggacgttagcacccgccgtgtgtctcccgtgataacattcttcggtattcggagtttgcatcggtttggtaatccgggatggacccctagccgaaacagtgctctacccccgaagatgagttcacgaggcgctacctaaatagctttcggggagaaccagctatctcccggtttgattggcctttcacccccagccacaagtcatccgctaatttttcaacattagtcggttcggtcctccagttagtgttacccaaccttcaacctgcccatggctagatcaccgggtttcgggtctataccttgcaactagacgcccagttaagactcggtttccctacggctcccctatacggttaaccttgctacaaaatataagtcgctgacccattatacaaaaggtacgcagtcacaccacgaaggtgctcccactgcttgtacgtacacggtttcaggttctatttcactcccctcgccggggttcttttcgcctttccctcacggtactggttcactatcggtcagtcaggagtatttagccttggaggatggtccccccatattcagacaggatgtcacgtgtcccgccctactcatcgagttcacagcatgtgcatttttgtgtacgggactatcaccctgtaccgtgcgactttccagacgcttccactaacacacaaactgattcagactctgggctcctccccgttcgctcgccgctactaggggaatctcggttgatttcttttcctcggggtacttagatgtttcagttcccccggttcgcctcgttagactatgtattcatctaacgatagtgcaacgaattgcactgggtttccccattcgggtatcgtcggttgtaacgcttcatatcagcttaccgacgcttttcgcagattagcacgcccttcatcgcctctgactgcctaggcatccaccgtgtacgcttagtcgcttaacctcacaacccgaaggtgtctttcgacatcatcgtgctgcgattattgagagactctacctgcaggtgactccttgtctcggtaaatctacggagagacaagttttagctgcagtgtttcaattttcagcttgttccagattgttaaagagcaatatttcacaacatactgtccaccttgcggcagcaatatattttgaaatagttttatatggtggagctaagcgggagcgaaccgctgacctcctgcgtgcaaggcaggcgctctcccagctgagctatagccccatataaaaagcaaataccttattgctgcaactcatgtccagacaaggcgcagacacgcacgtttattgttataaacgaatgtgacggtaacgcactacagggatgagttggtgggtctgagtggacttgaaccaccgacctcacccttatcaggggtgcgctctaaccacctgagctacagacccaacaaggtactaaagcccgactaatctctcagcccggccttatttgctcgttactttctatcagacaatctgtgtggacactgcgcaatgcgtatcattaggtaaggaggtgatccaaccgcaggttcccctacggttaccttgttacgacttcaccccagtcatgaatcacaaagtggtaagcgccctcccgaaggttaagctacctacttcttttgcaacccactcccatggtgtgacgggcggtgtgtacaaggcccgggaacgtattcaccgtagcattctgatctacgattactagcgattccgacttcatggagtcgagttgcagactccaatccggactacgacagactttatgtggtccgcttgctctcgcgagttcgcttcactttgtatctgccattgtagcacgtgtgtagccctactcgtaagggccatgatgacttgacgtcatccccaccttcctccggtttatcaccggcagtctcccttgagttcccaccatgacgtgctggcaacaaaggataagggttgcgctcgttgcgggacttaacccaacatttcacaacacgagctgacgacagccatgcagcacctgtctcacagttcccgaaggcaccgaagcatctctgctacgttctgtggatgtcaagagtaggtaaggttcttcgcgttgcatcgaattaaaccacatgctccaccgcttgtgcgggcccccgtcaattcatttgagttttaaccttgcggccgtactccccaggcggtcgacttaacgcgttagctccggaagccacgcctcaagggcacaacctccaagtcgacatcgtttacagcgtggactaccagggtatctaatcctgtttgctccccacgctttcgcacctgagcgtcagtctttgtccagggggccgccttcgccaccggtattcctccagatctctacgcatttcaccgctacacctggaattctacccccctctacaagactctagcttgccagtttcaaatgcagttcccaagttaagctcggggatttcacatctgacttaacaaaccgcctgcgtgcgctttacgcccagtaattccgattaacgcttgcaccctccgtattaccgcggctgctggcacggagttagccggtgcttcttctgcgagtaacgtcaatcacttcacgtattaggtgaaatgccttcctcctcgctgaaagtgctttacaacccgaaggccttcttcacacacgcggcatggctgcatcaggcttgcgcccattgtgcaatattccccactgctgcctcccgtaggagtctggaccgtgtctcagttccagtgtggctggtcatcctctcagaccagctagggatcgtcgcctaggtgagccattaccccacctactagctaatcccatctgggcacatccgatggcgtgaggccctaaggtcccccactttgctcttgcgaggttatgcggtattagctaccgtttccagtagttatccccctccatcaggcagtttcccagacattactcacccgtccgccgctcgccggcaaagtagcaagctactttccgctgccgctcgacttgcatgtgttaggcctgccgccagcgttcaatctgagccatgatcaaactcttcaatttaagatttgtttgatttgctaccgaagtagcgatgctcaaagattactttctgcaaatatgcattcgaaccgaagttcaaatgttcactgctttggtcactcttcaagacttgatatttcttctgcctgccgaaacaggctttgatatcgtcttgcgagtgcccacacagattgtctgataaattgttaaagagcagtgagttagcaacctttcggtgggtaactcgaggtgcgcatattacgctttcctcactcagagtcaactacttatttcgttgaatttctctgttctctttgccggccactcagttacttgattcgctgtgtgccgtctcgatggatgcgcattatagggagtcgaattttttgcacaactcttttttcgcctttttctactgtttgaatacttttcgctccttacgggtagatcttgcacgatctccgccattttcggctcgatccaaccggctgtctggttgtaattccaccagcaaaggatagtattgccagtaaattatgatcttattacggggctttgttatgtctgattctattcgtcgttacctaaattacactccgatccttggccagaaggtaatgatcgataaatcgagcgtagtgatcggcaatgttttgctcggtgatgacgtcagcgtgtggccgttagttgctattcgcggcgatgtaaatcaggtcaaaattggtgctcgcaccaatattcaggatggaagcgtcttgcatgtcacccatcagtccgaatacaaccctacaggtcatcctcttatcatcggcgaagacgtgaccgtcggacataaagcgatgcttcacggctgcacgattggtaatcgcgtattagtcgggatgggttcgattctgctggatggcgcggttatagaagatgatgtgatgattggcgctggcagtttagttgcgcccggtaaaagattagtcagtggttacctttatatgggaagcccggctaagcagattcgtccgttaacccccgcagagctggaaggattgatttactcggcaaacaactatgtacgttggaaggatgattacctggctgaagaaaagtaataccccccttcttgttctctatctatatagagggaaacaatagactccctctatatagacatatatctgatgcctaaataaaacgacacctatgccaatcagtggccgagttcttcgctcaaaagcgctaataccggcgtaatctccggcatcacgccatgccaaagataaaacgcatgcgccgcctgccctaccaacattcctaaaccatcagcatactgcgttgctcccaacgcggaggcccaagtaaggaagggcgtatctccctgttgataaaacatatcgtaacaacgagtgtttggggcaataagagaagcagggagtgcgggaacgtcgccatgaatgcccgaagctgtagcattaataacaagatcgaagcactgcccttcaagatctgccatttctactgcttctatttcgccaaggtgcctaaacacttcggataactgctgcgcccgactaaaagttcggttagtaataacaatcttacaaccaaaagaaagcagaggcaggataacgccacgcgcagcgccaccggcaccgaccagcaggatacgatcctgcggcttgatcagctccaaacgttccagatcgctgagcaaaccgataccatcggtgttatctccgagtaagcggccatcttccaaaacctttaaggtattcaccgcaccggcaaattcggcacgctcagttaactccgccgatgctgcataagcccgctctttaaatggcgtggtgatatttgcacctttcgccccctgagcaaaaaacgtagccagcgttgtttcgaactcatcatgaggagccagcaccgttccgtaatgatgctcaatacccgtttgggcggcaaaaagggcatgtattcgcggcgacttactatgggctatcggattgccaaaaactgcaaacggttgttccactctctttccttaaccttgacggaaacgctcaccggtgagggcatcacgaatttcagatggatttaaacgcccgcccaccagcccggacaatactgccagatcggttccaagctgctttcgaacctcttcttccgtacggcaaggctctaacccactgaggttcgcgctggttgaaaccagaggctttccataataggtacacaactgttgcactaagggatggtcgctaacccgaacggccagagagtcaaagtgccccgtcagccaacgaggcgtcgttttcctggctggaataacccatgtcaccggaccgggccagctggcaaatattgttgcgcgttgcgtttcatctaactgcgagtcatcaatataaggcaagagttgctcataatttgctgcaatcagaatcagccctttctgccagggacgctgttttaacgccagcaaagcatttaccgctttttcactatcgggatcgcaacccaggccgaatacagcctcagttggataggcaataacgtcttcttgctgcaaagcttgcagtacaccttcaaaaagggagatatcttctttacacatgggttcttactcgattgccactggtttcccacataatttgctagcacaaaaacgcttcacgccctgcgcagtgcgtttttccattagaagcgggtagtggcaatgggcacattctccggctataggttgctgattaagcgcaaattggcagtcaggatagcgattacaagcgtgaaaaacctttccaaaacgggatttacgttgcaacagttttcccttaccgcattgtgggcaagtaatagatgtttcatctggtttatcgataacttcggtatggtcacattcaggatatttgctacagccaataaacataccgtagcgcccttgtcgtaacaccaataccgcctgacacttcggacattcctgcccttccaacactttaactatgtgtccgtccgcctgcgcctttaacggccgcatatattggcattcggggtaatgagaacaaccaagaaacgggccatgaccaccgcggcggatcactaatgctgacccacactcagggcaggacccattatccttcgcagttgcagtttttgtcataacgctttctctaatcgattaatctgcgccgatattaccacctagtgcagataaccctcattaacttcaaagagcaattcttccatctgttgataggcattttcatattcaggcacgttgaacagcaccatcagcaccacccatttaagatcttccagatcaaactcggctgaatcgagcgccataatacgatcaataaccatttcgcgggtatcgagttttagcacattaatttgttcgaggaataggataaaaccacggcattcgacgtccaacttcatgatttcttcaggagtatagatacgaagcgccaaaggatcggcactgtactgataaggcgctatttcaccttcctgtaaatcagccaacgcctccagccaattcaaggcgttatagatgtcttcacgatagaaacccgcatccgctagatcgtcagtaattttgtcctgatcggcgagcatttcggtgtcgttatgcatgtatgtttcaaataggtacatcaaaacgtcgaacatggcctgccctccttattcggacatagccgccgggtacagctgcgatccaccctgctaactccagctcgagtaatttcactacgatttctggcacagtatggccggcacgttcggcgacgacatcaatgggtgtcacctcatattctacgttagccaacacatcaggaaatggcaattcaagttgcggttctggcgcagaaataatttcttccataggcaaaggtagccaatgtaaggaactccccagctgctcaatgacctcccgcggatggcaaaccaggttcgctccttgctgaatcagccagtgtgtcccttcactcccagagctatcgagtgagccgggtagagagaaaacttcccggccttgctccaaagcataccgagccgtaatcaaagagccacttttacgcgttgcttcaatgacgatcacccccgcgcttagcccacttataattcggtttctccgagggaaatgagcggcaataggtaatgccgtagataaaaactcagaaaccagcgcaccgccatttgcctcaatttcttgcgccaatcgtccgtgccgcttgggataaatattggcaagcccactccctagaaccgcaatagttttaccaccgcaacccaatactgcctgatggcaaataccatcaattcctaacgccaacccgctagtaatcgccaggccactttgagcaagttcagcagcaaaataacgcgcccaacgctctccgtaatggctgtaactccgactgccaaccatcgctatctgcgatgcaagtaatagctctttatttccagaaacaaacaacagcaaagggggcgataaaatcgccattaactgcgctggatagccaggctgaccatagaccagtaaatggtggccaggttgttccagccaggataacgtcttctcgatataacgcgggtttaggctccaaaattgttgaatttgtttatcataaagccccgatttccgtagggcttctgcgctgatatcactgagttttagcaacccaatccctagtaagcgacttttgctggtatcaagcccctgaactccattgatccttagccatagctccgttgctaacattccccctccctggcggatttgtctgtcaacaccaatttgttcaattggtagtcgatgctgtcaatcggagccaaaaatgtctagaatagagactgaatatcattcaccaatcggacgcagatctagatatttatgtcagtattacaggtgttacattacccagacgaccggctgcgcaaagttgctgcgccggtaaaagaagtcaatgcagaaatccaacgcatcgtggacgatatgttcgataccatgtacgcagaggaaggcattgggcttgccgctacgcaagtagatgtccatcagcagattatcgttatcgatgtttctgaaaaccgcgatcagcgcctggtcttaatcaaccctgagctgctggaaaaaagcggtgaaaccggtattgaagaaggctgcctctctattcctgagcaacgcgccctggttcctcgcgcagaaaaagtcaaagtcagagccttggaccgtgatgggaaaccttttgaactggaagcagacgatctgttagcgatctgtatccagcacgaaatggatcatttggttggcaaactgttcgtggactatctgtcgcctctgaagcgtcagcgtatccgccaaaagctggaaaaactggctaagctcaacgcgcgcgctaactaatccttttttatgcaggaaaccaaacgtgtctgattcattgcggattatttttgccggaacgcctgattttgcagcgcgtcatcttgacgcgctactttcttccaagcaccagattatcggggttttcactcaacccgatcgccctgctggccgaggtaacaaactcactccaagcccggtaaaggttttagctgagcaacacgatattcctgtttttcagccaaaatctctgcggccagaagaaaatcagcatctggtagccgatcttaacgccgatatcatggtcgtggtggcttatggcctcatcctgccaaaagcggtgttggatatgccacgtttaggttgtattaacgtacacggttctctgctgccccgttggcgtggagctgcgccaatccagcgttcactctgggctggggacaaagaaaccggtgtcactattatgcaaatggacgtcgggttagataccggcgatatgctgtataaaattgcctgcgatatacagccggaagataccagcgcgagcctatacgacaaactcgctgaacttgggccacagggtatgctggccacgctacaactgttagcggaaggtaaagccaaaccggaagtacaggatgaaagtctggtgacttatgcggaaaaactgagcaaagaggaagccagactgaactggtcactttctgctgctcagctagaacgctgcattcgcgcctttaatccctggccggttagctattttgtcatcgacgaacagccgataaaagtttggcaagctcatgttctacccgcggcatctaatactttacccggcaccatagtacaggcggataaacagggtattcaggtggcgacggctgacggcgtgctgaatattactcagttgcagccagcagggaagaaaccgatgtcggcggcagatttgctcaattcgcgacgcgaatggtttaccgtcggtaatcagttggcataaccgacgaattttaacaacgacttcatcgcccgatacttcactatcgggctattctttccctttattttgctgacatttgtcagcttttttggctatgaaaaacacatataacctccgcagcatcgctgccaaagcaattagccaggtactggatcaagggcaatctctcagcaccgtccttcctggtctccagaaaaatatctccgataaagaccgcgcgctgttgcaggagttgtgttttgggactttacgcgtgctgccgcagctggaatggtgtattcagcagctaatggcacgtccgatgacgggtaaacagcgggtctttcattacctgatcatggtgggcatttatcaattgctgtacacccggatcccacctcatgcggctttggctgaaacggtagaaggcgccgtagccctaaagcgaccacagcttaaaggtttgattaatggcgtattgcgccaattccaacgccagcaggtagagttgttggaacgcgcagccaatcatgacagccgctatttgcatccaagctggttactggctcgaattaaaaaagcctacccggagcaatggcagcaaatcatcgatgccaacaatcaaaaaccgccgatgtggctgcgcgttagtcgcttacaccatagccgagcagattatctggaattgatgcaacaagcgggtattgaagcggaacctcacgctgaatacgccgatgccgttcgtttgatcactccatgtgcggtaaacgatctgcctggttttgctcagggttgggtgacggtgcaagacgcctcagctcaaggctgcgttgatctgctcgatccgcagaacggcgaacagatcctcgatttatgcgctgcacccggcggtaaaaccacccatattctcgaagccgctcccaaagcgcacgtattggcggtagatattgatgaacaacgtcttagccgcgtaaaagaaaatctgcaacgcctgcaactgaatgcggtggttaaggtcggtgatggtcgtacacctgatgactggtgcgaagataagctattcgatcgtatccttttggatgcgccttgctctgccaccggcgtgattcgtcgtcatccagatatcaaatggctgcgccgtgacagcgatattgccgatcttgcccaattgcagtcagaaattcttgaggctatttggcctaagctgaagaaagatggcgtgatggtttacgcaacctgctcaattttgccggaagaaaaccaacagcagatcgccgcattcttgcagcgccatccggaagcgcgtttagtagaaacaggctcagcggctcatcccggtaaacaaaaccttcctcacccggaagacggtgatggcttcttttacgctaagctaattaaaagctaatcaaacctcagagtagcggttattgttaggccttcgggcctactttcagggtaaacagagaacgcgatgaaaataattattctcggtgcgggacaggttggcgggacgctggcagaaaatttggtcggtgaaaacaacgatattaccgttgtggataccaataccaatcggcttcgtcaattacaggacaagttcgatctgcgcgtagtacaaggtcacggttcgcacccacgggtgctgagagaagccggcgcagaagatgcagatatgctggttgctgtcactaactccgatgaaaccaacatgatcgcctgtcagatcgcctactcattatttaatacacctaaccgtatcgctcgtattcgctctcctgaatatatccgtgaatctgagaagcttttcctaccggaagctgtcccaattgatcatcttatatcgccggaacagttagtaatcgattatatatataagctgattgaatatcctggcgcacttcaggtagttaattttgccgaaggtaaggtcagtattgccgcagtaaaagcttattacggcggtcctctggtgggcaatgccttatcttcactacgcgaacatatgccgcatattgatacgcgagtcgcggctatatttcgtcaagaccgacctattcgtccacagggttcaactattatcgaagccggtgatgaagtcttttttgtcgccgcctcccagcacattcgcgcagtaatgagtgaattacagcgactggaaaaaccctataagcgaattatgattgttggcggtggtaacgtcggcgccggattggcattacgattagaaaaagactacagcgtaaaattaattgaacgtgaccagcagcgagcggctgaattagcggagatgctacacgacactatcgtattttacggtgatgcctcagatcaggaattattagccgaagaacacattgagcaagtcgatgtatttattgccatcaccaatgatgacgaagctaatattatgtctgccatgctagccaaacgtatgggggccaaaaaagccatggtgctcattcaacgcagtgcttatgtagatttagtgcaaggcagtgtaattgatattgccatttcaccacagcaagccacgatttccgcactgctcggccatgtgcgcaaagcagatattgttagcgtgtcttcactgcgacgcggcgtagcagaagctatcgaagctgtcgctcatggtgatgaaagtacatctaaagtagtaggacgagtggttgaagatattaaattaccgccgggtactacgattggcgctattgtacgtggagatgaagtgcttatcgctaatagcagctcggttattcaacaaggtgaccacgttgtaatgtttattaccgataaaaaattcgttcctgacgttgaacgcttgttccaaccaagcccattcttcttataaggctataatcttaatttcagggacgagtgaattaattaaaactattcccatgggaaaggatgaaaaatttcctataattcttgaggtacagggatttctgttagttaagattgtttcgtttaattttgaaggggtgttgctatgagctttatgaaagaatttcgtgaatttgccatgcgtgggaatgtggttgatttggcggtcggtgttattatcggtgccgctttcgggaagattgtttcctcgctggtcgcagatattatcatgccacctctaggactgttattaggcggcgtggacttcaaacaattccatttcgtactacgtgaagcccaaggtgcgattcctgcagttgtcatgaattatggttcatttattcaaagcatttttgatttcgttatcgttgcactggcaatcttctctgcaattaagctgatgaataaaatgcgtcgcgaaaaagcagaagaaccagcggtaccaccggcaccaactacggaagaaaagttattagccgagattcgtgatttattaaaagaacaacaaactaaataatcacgatttcagtacgtcaaaagccatcgtaagatggctttttttattccttaaaaccagaaggccagtggtaaagaatctgctgattgtttgccactggcctcccagttaccgcctttcgcgtgttttgttttacgctgatagctgcctttccctttactatttttctctattcgctgcctgaacagtgggtcatgtaacaatgcttccagagcattatctttaattttgcctttagtgtgacggtaagtagtcatggtagatcctcattgtaataaacattgtttgaaaaacgttcgaatcatactgctgttcgtccagtaatgaaataactaggcaaacaaatttagtttcgcgaggtttcgtccgtagcgccttgctccagcgcttctaagatcgaacagtaagtgctggtatggtggctaccgcaacaggcatcgcttaaacgtttgagagattcccgcattttctgcaattctttaattttcccctcaacttcactgagtctggaatcgacgatcgatttggattcctgacatgtatgatgctcaggatcgactcggatcgataatagttccgcgatcgtctccagagtaaaacctaactgtttggcatatcggataaagcgtaaacgctgtaaatcctgttcattatataagcgataaccgccttcagtacgaatgccatgttccatcattccctgtttttcataatatcgcaccgtatcaggtgtgacatcggccagcttggccaattgacctattttcaacatcctgattctccagacagtttttcggataatggcagctgataatcaccgtgcaaaaaatcggtattcaatcccgcttgtttcaacttcagttcgagtaaacccagccgcttcgataatttctgatactccgcttcattgtgatctaattgcgcgagtagatgaataatagtcagtgcttcttgccgatcttgtaactcgacgggaatatagccagcattcttcagaattcgataactgaccctaagctcagtaggaatatgagtatcatcatcaagttccaggggcacaccaaaaccgggcaaattttcaagttcacctttttttgcgcatccattatgtgcctttcagcccattcatcaattaatgacatacacgtagttcccagctttaaccgatatacatagcataacgcattaggatgcagataataagcgagggaaataatcacgaagaacggctaagacggtcttattttgggcagggctgtcaatagacgtaaaaaaaccgggcaagcccggtttttttacgcgttcacagattactctgcagctactacttctgcttcagacgcagcacgatcaaccagctcgatgtaagccatcggagcgttgtcgcctgcacggaagccacacttaagaatgcgagtgtaaccaccggcgcggctcgcgaaacgcgggcctagctcgttaaacagttttgccacgatctcgttatcacgagtacgggcgaatgccagacgacgattagcaacgctgtcggtcttggcaagagtaatcagcggctcaacaacgcgacgcagctctttcgctttcggcagggtcgtcttgatgatctcatgacgaaccaaagagccggccatgttacggaacatagcctggcgatggctgctgttacggttcagttgacgaccactcttacgatggcgcatgaccttatccttctcagtaaaaccttaacctgtgatccggttactcgtcagcaatacttgctggcggccagttttccaggcgcatgcccagagacagaccacgtgacgcaagcacgtctttaatctcagtaagagattttttacccaggttcggcgttttcagcaactcaacctcggtacgctgtaccagatcaccgatgtagtggatagcttctgccttgaggcagttagcagagcggacagtcaattccagatcgtcaacagggcgcagcaagatcggatcgaactctggcttctcttctttgacttccggctgacgtacatcacgtaggtcaacgaaagcttcaagttgttcagccaagatagtggccgcacggcggatcgcctcttcaggatcgatcgtaccattggtttccatctcgatgaccagcttgtccaagtcggtacgctgttctacacgcgctgcttcaacattgtaggcaatacgctctacagggctatagcatgcgtctactaacagacgaccaattgggcgctcatcttcttccgaatgaattcgggcagaagccggcacataaccacgaccgcgctgaactttgatacgcatgctaatagatgcgttttcatcggtcaggtggcagatcacgtgttgcggcttgacgatttcgacatcaccatcatgggtgatatcggctgcagtcacagggccaatgccagacttattcagggtaagaataacttcatcttttccttgaactctcaccgccagccctttcaggttgagcaggatctccaggatatcttcctgtacgccttctttggtgctgtactcatgcagtacaccatcaatctcaacctcggtcaccgcgcaacccggcatagatgaaagcagaatacggcgcagtgcgttgccgagagtatggccaaagccacgctctaacggctcaagggtcaccttggcgtgcgtcgaactgacttgctcgatatctaccaggcgcggttttagaaactctgtcacagaaccctgcattgtgtcctctctttggtactaagctttacttggagtaaagctcgacgatcaggtgttcgttaatgtccgcagacagatcagtacgttcaggaatacgtttgaacacaccttccatcttaacagcatcaacttccagccaagtcggcttttcacgctgctcagccagctccaaagctgccttcacacgagactgctttttagctttctcacggatgctgactacgtcattcggagatacctgataagaagcgatgttaacaacgcgaccatttaccatgatagctttatgactaaccagctgacgtgattcagcacgagttgcgccaaagcccatacggtaaactacgttgtccagacggccttccagcaattgcaacaggtttgcacctgtgttgcctttcagacgtgctgcttctttatagtagttacggaattgacgctccagaacaccatagatacggcgaactttttgtttttcacgtaactgcacaccgtaatcagacagacgcggtttacgcgcaccatgctgaccaggtggttgttcaatcttacacttggtgtcaatcgcgcgaacgccagacttaaggaacaggtctgtgccctcacgacggctcagcttgagcttaggacccaaatatcttgccattttctctctccaacaaacctaaaagcaacgttatacgcggcgctttttcggcggacgacaaccgttatgaggaatcggagtcacatcagtaatattagtgatgcggaaaccagccgcgtttaacgcgcgaatagttgactcacgaccaggaccaggtcctttaaccataacttccaggttcttaataccgtattctttcactgcttctgcgcagcgctctgctgcaacttgcgctgcaaacggagtagatttacgagaaccacggaaaccggaaccaccggctgttgcccaacccaaagcgttaccctgacgatcagtaatggtaacgatggtgttgttgaaagaagcatggatatgagccacaccgtcagagactgtctttcttacacgcttgcgtgcacgaataggtgcctttgccattattcaatcaccccgattatttcttgatcggtttacgcggacccttacgggtacgtgcgttggtcttagtacgctgaccgcgaactggtagaccacgacgatgacgcaaaccacgataagtcccaaggtccatcagacgcttgatgctcagggtcacctcacgacgcagatcaccttctacaacgtacttggcaacttcgtcacgcagcttctcgatttgctcttcagacagctcactgatcttaacattttcagcaatacccgcagcgacacagatagcctgtgaacgggtcttaccgataccgtagatcgcggttaaagcgataacagtatgtttctgatcaggaatgttaatgcctgctatacgggccactatgcactcctactattttatacggcaataccattctgaaaagcccgttttcaggatactcaaatagcattgctgtcacatacaaaagattggctggctaatctagccagctcaacccaactttgcaagaaaaatatgcaagataaatcagccttgacgctgtttatgctttggttcggcactgcagattacgcgaacgacaccgttacgcttaacaattttgcagttacgacataatttcttgacggaagcacgaactttcatttttactctccgtaacttctcaaacatatctgattagcgattatagcctttcagatttgctttcttcaatgcagactcgtactgactcgacatcattagagtttgcacttgagccataaagtccatgatgaccacaactacgattagtagtgaggtaccaccaaagtaaaatggtactttcatcgcgtcacgcatgaactccgggatcaggcagatgaaagtaatatacatcgcaccaattaaggtcagacgcgtcattactttatcgatgtacttcgccgtttgctctcccggacgaattcctggcacgaatgcaccggacttcttcaggttatctgctgtttcacgcgggttaaacaccaacgccgtgtagaagaaacagaagaagatgattgcagacgcatagagtaacacataaagcggctgtcccggctgcaaatacatcgaaatagtcgtcagccagttccaacctgtcccgcccccaaaccatgatgcaatcgtggcagggaacagaattatgctggaagcgaagattgcgggaataaccccagccatattcactttcaacggtaagtgtgtgctctgtgctgcataaacacgacgaccctgttgacgtttcgcatagttaacgacgatacgacgttgaccacgttcaatgaaaacaacgaagaaggttactgcaaacactaatactgcaaccaacagcaacaggaggaagtgcaggtcgccttgccgagcttgctcgatggtatgaccaactgccggcgggagacccgcgacaataccagcaaagattatgattgagataccgttaccgataccgcgttcagtaatctgttcacccagccacatcaggaacatagtcccggtaaccaggctcacaacagcggtaaaatagaaggcaaagcctggatttaataccagaccttgcatcccaggcatattcggcagaccggtagcaataccgatcgactggaatatagccaataccaacgtgccataacgggtgtactggctaatcttacgacggccagcctccccttctttctttatttcagctaacgctggatgaaccaccgtcagcagctggataataattgacgccgaaatatacggcataatacccagggcaaagatcgaagcacgactgagagcaccaccagagaacatgttgaacatttcaatgatggtgcctctctgctgctcgagcaatttggcaagcacagtggcatcgataccaggaatcggaataaaagagccgatacggaaaacaataagcgcaccgataacaaacaaaagtctgcgcttcagttcgcctaatccgcctttagcactttgaaaatctaatcctggttgcttagccatctgctacttattcctcaattttaccgccagcagcttcgatagcagcacgagcgcctttggtgacacgcagaccacgcagagttaccggacgagtgacttcgcctgaaagcataactttcgcgaattcaatctgggtaccaacaacgttagcggctttcagcgtgttcaggtcgattacgtcgccttccactaaagccagttcagacagacgaacttctgccgtgatcattgctttgcgagaggtgaagccgaatttcggcagacgacgatataacggcatctgaccaccttcaaacccacgacgtacgccaccgccagaacgtgagttctgacctttgtgaccacgaccagcggttttacccaggccagaaccgataccacgacctacacgcttaggcgcatgcttggcaccatcagccggagacagagtatttaaacgcatctgttactcctcaactttaaccatgtaggaaaccaagttgaccataccacgcacagcaggagtatcctcacgctctacagtatgaccaatacgacgcagacctaaaccgagtagagttgccttatgctttggcaaacgaccgatgctgctttttgtttgagttactttaatagtctttgccatggttatttccctagaatttcttcgacggacttaccacgcttggcagcgaccatttctggggatttcatatcttccagagctgaaatagttgcacgaaccacgttgatcgggttagtggaaccataggctttggccaatacgttatgaacccctgcaacttccagaacggcgcgcattgcaccaccggcgatgataccggtaccttcggaagctggttgcatgaatacgcgagaacccgtatgagcacctttaacagggtgctgcagagtgccgccatccagagcaacgttaatcatagcgcgacgggctttttccatcgctttttggatcgctgctggaacttcgcgtgctttgccgtagccaaaaccaacgcgaccgttaccatcaccaactactgtcagtgcggtaaagctgaaaatacggccaccttttacggttttagatacgcggtttaccgcgatcagcttttcctgcagttcgccagcttgtttttcgatgtgtgacatcttacacctctaccttagaactgaaggccagcttcacgggcagcatctgccagtgcctggactcgaccatgatattggaaaccggaacggtcaaaggatactttagtaatccctttttccaatgcgcgctcagcaatagatttgcctacagctgctgcggcatctttgttgccggagtacttcaattgctcattgatagctttttctaaagtagaagctgctaccaaaatttcagaaccgtttggtgcaataacctgcgcgtaaatatggcgtggggtacgatgtaccaccaggcgagtcgcacccagttctttgagcttgcggcgtgcgcgggtcgcacgacggatacgagctgctttcttatccatagtgttaccttacttcttcttagcctctttggtacgcacgacttcgtcggcgtaacggacacccttgcctttataaggctcaggacgacggtaggcacgcaaatctgccgcaacctgaccaatcacctgcttatctgcgcctttcagcacgatttcagtttgggtcgggcactctgcagtgatgccagccggcaattcatggtcaactggatgagagaagcctaaggccaaattcaccacattgcctttaactgcggcacggtaacctacgcctaccagttgaagctttttagtgaagccgtcggtaacaccaataaccattgagttcagcagtgcacgagtggtacccgcttgggcccaaccgtctacagcgccttcgcgtggagcgaaagtcagtgtattttcttcttgcttaacaacaacggagctatggatggtacgagtcagctcgccgtttttaccctttatcgaaataacctgaccgttgagttttacctctacgccggcaggaatgacgacgggtgcttttgcaacacgagacattctttcctcccgaattaagctacgtagcagataatctcgccaccaagaccagcctggcgagctgcacgatcggtcataacacctttagaggtagaaataacagcgatacccaaaccggccataacttttggcagctcatcttttttcttatagatgcgcagacctggacggctgatacgttgaatgctttctaccactgccttgccctggaagtacttaagtactaagaccagttcaggcttggtgtcgccttcgattttaaaatcttcaataaaaccttcttctttcagaaccttggcaattgccagtttcagtttggaagaaggcatggtgaccgctactttgttcgcggcttgaccgttacggatacgggtcagcatatccgcgatcggatcttgcatgctcatctgtatttactcccgtgattcaattggtgaaattaccagctagcctttttaaggcccgggatttcaccgcgcattgcggtttcacggactttaatacggctcaacccgaacttccgcaggaaaccatgcggacgaccagtttggttgcagcggttacgctgacgggacgggctggaatcacgcggcagagactgcagcttcagaacagcatcccaacgttcttcatcggatgagttcacaccagagataatagcttttaattcctcgcgtttagcgcggtatttgttagctagtttcacgcgaacgacttcgcgtgctttcattgattgcttagccatcagtaaccctaccttacttgcggaatgggaagttaaaagcagccaacaatgcacggccttcatcatcggatttcgcagtagtggtaatggtaatatccaaaccacgcacgcgatcgactttatcgtagtcgacttccgggaagatgatctgctcgcgcacgcccatgctgtagttaccacggccatcgaatgacttagcggacaagccacggaagtcacggatacgtggaacagcaatggagatcagtcgctctaagaattcccacatgcgttcgccacgcagggttactttacagccgatcggatagccctgacggattttgaagcctgcaacagatttgcgggctttggtgatcaacggtttttgaccggagattgctgtcaagtcagctgctgcgttatccagcagtttcttgtcagcgatcgcttcaccaacacccatgttcagggtgatcttctcgacccgagggacttgcatgacagagttgtagccaaactgagacatcagttgtttgaccacctcgtctttgtagtaatcatgcagtttcgccatcgtattactccaaattacttgatagtttcgctattagacttgaagaagcgtacttttttgccgtcttcgaatctaaagcctacacggtcagccttaccggttgtcgcgttgaacagcgcaatgttagaaacctgaatagcagcttctttttcaacaatgccgcctggttggttcagggccggaaccggcttctgatgttttttaaccaggttgataccttcaacaatgaccttaccagcagacaggacattctttactttaccgcgcttacctttgtctttcccggttagcacgataacttcgtcatcacgacggattttcgctgccatggttcgctccttagagtacttctggtgccagagagataattttcatgaacttctcattacgcagttcacgagttaccggcccaaaaatacgcgtgccgattggctgctcgctgttattatttaaaataacgcaagaattgccatcgaagcgaatgacagaaccgtccgggcgacgtacacccttcttggtgcgcaccactaccgccttcagcacatcgcctttcttcaccttgccacgaggaattgcttccttaatggtgatcttgatgatgtcgccgatgcctgcgtagcgacggtgcgagccacctagaaccttgatacacattacgcgacgtgcaccggagttgtcggccacgttcagcatagtctgttcttggatcatgttagtgctccgctaatgtcaactactactttaggacccagaataggtcgtttaaaagccccactaatgagggcgcggcattataacaccggttccaaattatgggtagaaaaaataaacggctcactttctgagccgtttattctatgcgagttggctactctattacagaatcgctttctctacaacgcgaacaagggtccaagacttagtctttgacaatggacggcattcgcggatttctaccacgtcaccgattccacattcattgttctcgtcatgtacatgcaatttcgtcgtacgacggatgaatttcccataaatagggtgtttcaccacacgttcgatagcaacaaccatggatttctccattttgtcactaactacgcgaccttgcagagtacgagtttggtcagtcattacgcacccgccttttcagtcagtaaagtcttaacacgtgcgatattacgacgcacttgtttcgacaggtgagtttgttgcagctggccactagccgcctgcatgcgcaaattaaattgctcacgcagcaggttgagcagctcagtgttcagctcttcaacgcttttttcacgcagctcttgtgctttcattacatcaccgtcttagttacaaaggtggttccgacaggcagttttgctgccgcgagcttgaatgcttcgcgagcagtttcttccggcacaccagccatttcaaacaacatttttcctggctggatcagggcaacccaatactctacgttacccttacctttacccatacgcacttcgagcggcttctcagtgatcggtttgtccgggaatacacggatccagaccttaccttgacgcttaattgcacgtgtcatcgcacgacgggctgcttcgatttgacgagccgtcaggcggcaacggccacaagctttcaggccgaactcaccgaagctaacatccgtaccctgcgccaggccacggttacggcctttgtgcatcttacggaattttgtacgctttggttgtaacatcagcgattctccttacttgcggcctttacgctgctgctttttaggttgagcagccggttccggttgttcaacagcagccataccacccaagatctcacctttgaagatccataccttaacgccgattacaccataagtggtgtgcgcttcagatgtgttgtaatcgatatccgcacgcagagtatgcaacggaacacgaccttcacggtaccattcggtacgcgcgatttcagcaccgccaaggcggccgcttacttcaactttgatacctttagcgccaagacgcattgcgttctgtacagcacgcttcatagcacgacggaacataacgcgacgttccagctgtgaagtgatgctgtcagcaaccaattttgcgtccagttccggtttacggacttcggcgatgttaatctgcgcaggaacgccagcgatatccgctacgaccttacgcagtttttcgacatcttcacctttcttgccgataacgatgccagggcgagcagtgtgaatagtcacacggatactcttcgctggacgttcgataacgatgcgagaaacggaagctttcaccagttccttagtcaggaattggcgaactttaaagtcgctgtccaggttgtcagcgaattctttggtattcgcataccaagtagagttccaaggtttgacaatacccaggcgaataccgttaggatgtactttctgacccattgctagtctccagagtctcagcgatcggacacaaccacagtaatgtggctggtgcgcttcaggatgcgatctgcacgaccttttgcacgaggcataatgcgcttcatgcttgggccttcgtctacgaagatcttcgtgactttcagatcatcgatgtcagcgccatcgttgtgttctgcgttagcaatggcagactccagtaccttcttaaccaaaccagcagctttcttgttggtataggccagagtttccagagcttgcgacactttcttaccgcgaatcaggtccgctaccaagcgaaccttctgagcagaagaacgagcgtggcgatgtttagcgatagtttccatctcttcctcctaccttagcgctttttagcctttttatcggccgcatggccgcgataagtacgggtcggcgcgaattcacccaatttgtgaccgaccatttcatcggaaacaaagacaggaacgtgctgacgaccattatggacagcgatggtcaaaccgatcatatttggaaagaccgttgaacgacgggaccaagtccgaataggcttcttgtctccgctttccaccgctttctctaccttcttcagcaagtgcaggtcaatgaagggacctttcttgagagaacgtggcatggcttatcctctaattattttttactacggcgacgtacgatgaacttatcagtacgcttgttgctacgggtcttcttacctttggtttgaacgccccacggggttaccgggtgcttaccaaagttacgaccttcaccaccaccgtgtgggtgatctaccgggttcatcgcagtaccgcgaacggtagggcgaataccacgccaacgacttgcacctgctttacccagcacacgcagcatgtgttcagcgttaccgacttcacctaaggtggcgcggcaatcagcttgaaccttgcgcatttcgccggagcgcagacgcagagtaacgtaggaaccgtcacgagcaacgatctgaacgtatgcaccagcagaacgagccatctggccgcctttacctggtttcatctctacgttatgaaccgttgaaccaactgggatgttgcgcataggcagggtgttacctgtcttgattgcagcatcaacgccagattggatctggtcaccagctttcaggccttttggcgccaggatgtaacggcgttcgccgtctttgtacagaaccagcgcgatgttcgcggaacggttcggatcgtattccagacgctcaaccactgcagggataccatctttgttgcgtttgaagtcaaccagacgataatgctgcttgtggccaccaccgatatgacgggtggtgatacggccattgttgttacgaccaccgcttttgcttaatttctcaagcagcggggcataaggtttacccttgtgcagctcagggttaaccactttaacaacgtggcgacgacccggagatgtaggtttacatttaacaattgccattgtttactcctccgacttactctgcgccgccgatgaagtccagattctggccttctttcagggtgacgtaagcttttttccagtcgctacgacgaccaacacgctgaccgtgacgcttactcttgcctttaaccagcaaggtgttaacgtcttcaacttcgacttcaaacagtttctgcactgcagctttaatttctgctttggtcgcgtcgatggcaactttgagaacgatggtgttacttttttccatcgcagcggacgctttttcagatacatgcggcgcgcgcagtactttcagcagacgttcttcacgaatcatgccagcatctcctcaacttgcttcacagcatcagcagtcataaccactttgtcgaaggcgatcaggctaactggatcgatacctgctacatcgcgaacatcaaccttgtacaggttgcgagctgccaagaacaagttctcgtcaacttcaccagttacgatcagcacatcttccagagccatatctttcagtttctgtgccagcagcttagttttaggcgcttctacagagaacttctcgacaatgatcagacgatcttgacgtaccaattcggacaggatgcttttcagcgcgccgcggtacatctttttgtttactttctgactgtggtcctgaggcttcgcagcaaaggtcacaccacctgaacgccagatcgggctctttacagaacctgcgcgtgcacggccggtacctttctggcgccacggttttttaccggaaccagtcacttcagcgcgggtcttctgagcgcgagtaccttgacgggcacctgctgcataagcaacaacaacctgatgtaccagcgcttcgttgaaatcacgaccgaaggtagtttcggaaacagtcagcgcgccttgcgcgtctttcaatactaattccattgctatccccttacgccttcacagctggtttaacgatcaggttgccaccggttgcgcccggtacagcacccttaaccagcagcaggttgcgctcagcgtcaacacgtactacgtccaggctttgaacggttacacgctcgtcacccaggtggccagccattttcttgcctttgaacactttgcccggagtctggttctgaccgatagaacccggaacgcggtgagacaaggagttaccatgggtagcatcttgggtacggaagttccagcgcttaacagtaccggcaaaacctttacctttagatgtacctgtaacatcgactttcttaacgtctgcgaaaatttcaacgctaatttcttgaccagcagtgaattcttgaccttctgcaaggcggaattcccacaggccacggccagcttctacgccagctttagcgaagtgacccgcttccggtttggtaacgcggttagcttttttagcaccggtagttacttgaacggcacggtaaccgtcgttctccaggtctttgacctgagttacgcggtttgcttcaatttcgataacggttactgggattgaaacgccatcttcagtgaagatacgagtcatgcccacttttttaccgactaaaccaatcattgtttcaacctctcaatcgctcaatgacctgattaacccaggctgatctgcacgtctacaccggcagccagatccagacgcatcagagcatcaacggttttctcggttggctcaacgatgtcaaccagacgcttgtgagtgcggatttcgtactgatcgcgcgcatctttattgacgtgcggagaaaccagaacggtaaagcgctctttgcgggtcggcagcgggatcggaccggtgacctgcgcaccagtgcgcttggcagtctcgacgatttccgcagttgattgatcgatcaaacgatgatcaaacgctttcaggcggatacggattctttggttctgcatgagaccagagctccaattatttataaacataaatgattactactcagacccatttcgattgatgggagagtgtaatcgttcaacatataacccccaaatcgggagtattgttcggaagtatcatttagctactcccgacagatcaaattcaatctgaccaaccaagattaggtaggcacgcgcattatacgtaaattcgggcagtaagcaagtcactgttgaaaatctatgcgagaacttacgtatttagccattcatctcaagttttagtgaatttacttattatcacactacgttactataggtgagtaacaaatattgaccaatacagggagagggagagttggtcatccatatattcgcaaaagggactatgccatggctcataattgccggagtattctactacttgttatcgtatgtttcatgactcaagcaatagcgagtacgcgctcgatttttcccctgcaggcctacaaccaaagccctacctattggtttccacccaacgcccccgattatactaaacccttagtttccgccaaacttcagcagcaagctcatcaaaacctactcaaacactatttcggcggcagccctacctcttcttcgccttgggatgagcactatgttcagcaaaagctatcggataaaggaacggatagtatcgcttcttctataaagaaagtattagagcgctttgacaatgtagatgccaagggagatagcattaattacggcagtaattatcgtccctatacacaaacatggattgatagcattcgtaccaatgtgccgctaactcagttcaagaagctacattttcacgctgcacagagaggaataaccgtaagtcaaacgatggttagagtgctccctaccaatgatcctagcttttatagcgatgctatcgcgggtgaaggttaccctttcgataacctgcaagaatcgcggctacacattggaacgcccatttatgtcattgggcatagtgccgatactctgtggagtttcattatgagcccagacttacagggatgggtgctgtctaattctattgcctatgccgatgaggcttttatccaactatggcgaagtgcggcaaaaaaaaagatggcggtaataaccgacttcaacgtagcgttgactgagccacatcaatctcgtatttatgccagtgatgacatggggagcattctcccacagcttgacgcccaacacctgatgattccggtggttaacaatcggcaacaagctgttatacatatcgccagagtagcgcccgacaaaataagtaccctaccgctcgctgcaagccgtaagaattttgcgttactgattcagcgttcactaggtcgcccttacggatggggaggcttgtacggctacaacgattgttcgagcgaattaaaaaatctgatgaccgcattcgggttttggctccccactcactcttcaaaacaaatcactcagggaaaaaccgttgatttaagccaatatccgccaaacgagcgcctagactttctggctaagcatggtcggccttttatgaccctcattcatattcggggacatattatgctgtacgtaggaaacactgatgaagaacggccgatgacctttcaaaacatatggggcttagggccgaaagatcgtagcaggagatctattattgggcaggcagttctgttccctctattgctttcttatccagaagatcgctctctggcatctttggcggcaggccctatatttcagatcagttatctcgaccagcctagctatatcgataaatcttagtgcacagtgtatatagtgctggtaagtaagtactgcgccaccctcaattgaatagacaaaaagtgagcaccgttgagatactcacttttttgttatcccagcattgtggcacaacagcttagttaagcttccctagctgcgcctgagagtagttctgtatacctaaacgttctatcaggctcagttcagtttccagccaatcaatatgttcttcttcatcggtcagaatttctttaagcagatcgcgagtaacataatcatgtatcgaatcagcataagcgatgccttcacgtaaatctttggcgccgcttaattcaagagccagatccgacctgagcatctcctcgacgtcttcgccaatattgattttgcctaaatcctgtagattaggaataccctcgagaaacagaatccgctcaatgtaacgatctgcatgtttcatttcatcgatggattcgtggtattccttatcattcagacggataagtccccagtttttaaacattcgcgcatgcaggaagtattgattgatagcaaccagctcgtttccgagtagtttattgagatgagaaattatttttttatcgcctttcatagataagccctccgcttccagtactaaaagtgtagtaccagatggcaaagagtggggaatcttatcccacctatgttttaagcaacgtcattcatttctggaatattcgcacactcctcgatcaaaatttctctcgcctgccggatacattttccgcaatcagttccgattggaaccagttggcgtagttgcttcaaagtatggggatgatgctggcgaacagcattgcggatgactttatcagacactccattacacaaacatacgtacatataaggctcacttcttaaccaatgccgtaagtgtaaatgggaatgctttttatttcaattaagattattttcttttgatataaaaaagggcgccggagcgcccttctaacttaatcagtaaagaaattaagagattactttagcaacaacaccagcgcctacagtacggccgccttcacggattgcgaaacgcagaccgtcatccatcgcgattgggtggatcaaggtaactttcatgttgatgttgtcacctggcattaccatctcaacgccttctggcagttcgatagtaccggtcacgtcagttgtacggaagtagaactgtggacggtagcctttgaagaacggagtatgacggccgccttcgtctttgctcagaatataaacttctgaatcaaaggtagtgtgtggtttgatagaacctggtttagccagaacctgaccacgttcgatatcttcacgcttaataccacgcagcagaacaccaacgttctcaccagcacggccttcgtccagcaatttgcggaacatttcaacgccagtacaagtagatttaacagtatctttgataccaacgatctctacttcttcaccaactttaacgataccgcgctctacacgaccagttacaacagtaccacggccggagatggagaatacgtcttcgataggcagcaggaacggcttgtcgatagcacgttctggttctgggatgtaagaatccaggaagccagccagttcgatgattttagcttcccactcaggagcgccttccagtgctttcagcgctgaaccgcgaactactgggatatcgtcgcctgggaaatcgtaagtagacagaagttcacgaacttccatttctaccagttccagcagctcttcgtcgtcaaccatgtcgcatttgttcatgaatacgatcatgtaaggaacgccaacctggcgacccaacaggatgtgctcacgagtctgtggcatagggccatcagttgcagcaacaaccaggatagcgccatccatctgcgcagcaccggtgatcatgtttttaacgtagtcggcgtgacctgggcagtcaacgtgcgcgtagtggcgagtcggggtgtcatattcaacgtgagaagtgttgatggtgataccacgagctttttcttctggcgcgttatcgatctgatcgaatgcacgagcgttaccgccgtaggttttagccaatacggaagtgattgcagcagtcagggtagttttaccatggtcaacgtggccgatagtaccgacgtttacatggggtttggtacgttcaaatttttctttagacacgactatattccttactcttgtgctctcccacttatgagagagcactggatcattgttttaaacccgaaagcttatttgccacgggcttcgataacggctttagcgacgttgctaggtgcttcagcatactccaggaattccatggagtaagaagcacggccctgagtctgagaacgcaggtcagtagcataaccgaacatttcagacaacggaaccttgacgcgaacggttttaccggtagcagtatcttccataccttcgatgataccgcgacgacggttaaggtcgcccattacgtcacccatgtaatcttctggggtttcgacttcaaccttcatgattggctcaagcagaactggtttagctcgtttgaaaccttctttaaaggcgatagaaccggctaatttaaacgccaattctgaggagtcaacgtcatggtaagaaccgtaatgcagacgaatcttaacgtcaacaaccggataacctgccaatggaccagctttcagctgttcctggatacctttatcaacggctgggatgaactctttaggaatagaaccaccaacgatttcgttgacgaattcataacctacgccacccggtggcagcggagacatgtcgataacaacatgaccgtactgaccacgaccgcctgattgtttagcgtgcttaccttccacgtccttaacggtgtcgcggatggtttcacggtaagcaacctgaggtttaccgacgtttgcttccacgttaaactcgcggcgcatacggtcaaccaggatatccaagtgcagctcacccataccagcgatgatagtctgaccagattcttcgtcagtccaaacgcggaatgatggatcttcttttgccaagcgacccagagccatacccattttttcctggtcggctttggtttttggttcaacagcaacagagattactggctctgggaactccatacgttccaagatgataggattagctgggtcacacagggtgtcaccagtagtcacatctttcagaccgatcgctgctgcgatgtcgcctgcgcgaacttctttgatctcttcacgtttgttggcgtgcatctgtacgatacgacccagacgctcacgctgtgaacgcactgagttcaacacggtgtcgccggagtttacaacgccagagtacacgcggaagaaggtcaagttaccaacaaacgggtcggtagcaattttgaacgccagtgcagagaatggctcgttgtcagatgaatgacgaacagccggggtatctttaccatcgtccagaataccgttgatagcttcaacgtcagttggagccggcaggtattcgataaccgcatccagcatcgcctgtacgcctttgtttttaaacgcagaaccacaggttaccagaataatttcgttgttcagaacgcgttgacgcagagctttcttgacttcagcctcggtcagctcttcgccgcccaagtatttgtccatcagctcatctgaagcttcagctgcagattcaaccaggttctggtgccattctttagccagctcaaccatgtcagcagggatatcttcgtattcgaaggtaacgccctgatctgcatcgttccagttgatggctttcattttcaccagatcgataacgccggtgaatttctcttctgcgccgattgccagttgcaatggaactggattcgcgcccagacgagatttgatctgaccaacaactttcaggaagttagcacccatacggtccattttgttaacgaacgcgatgcgtggaactttatatttgttagcctgacgccatacggtttcagactgcggctgaacaccaccaacagcacagtaaaccattacagcaccatcaagaacacgcatggaacgttctacttcgatggtgaagtcaacgtgtcctggggtgtcaatgatgttgacgcggtgtggctcaaactgcttagccataccagaccagaaggccgtggttgcagcagaagtgatggtaataccacgttcctgctcctgttccatccagtccatggtggctgcgccgtcatgaacttcaccgattttatgatttacgccggtgtagaacagaatacgttcggtagtggtggttttaccggcgtcgatgtgagcactgataccgatattacgatagcgctcaatgggtgttgtacgagccatttgattcctctattcctagggcgttcaagttcagttaacccatgcgggttggctaattgaagcgcccgcatggttagcattactactgcgtggtaattaccagcggtagtgggcgaacgccttgttggcttctgccatgcggtgaacgtcttcacgtttcttaacagcagaacctttgttctctgctgcgtcagacagttcattcgccaagcgcagagccatggatttatcaccgcgtttacgagcagcatcaacgatccaacgcattgccagggcattacgacgaaccggacgaacttctactggtacctggtaggttgaaccaccaacgcggcgagacttaacttctacagtcgggcgcacgttatcaagagcagtttcaaacgcttccaggtagtctttaccagaacgctgagccagggtttccagcgcggtatagacgattgcttctgcagtagattttttaccatctaccatcaggatgtttacaaatttggccagtaactcagatccgaacttaggatctggcaagattttacgttgaccaataacacgacgacgtggcatggaaatactccgttgttaattcagggttgtccaaaactctaagagtttattttgacattaaagtgaaaatgtttggccttacttaacggagaaccattaagcctttggcttcttcacgccgtacttagaacgagcttgcttacggtctttaacacctgagcagtcaagcgcgccgcgaacggtgtggtaacgcacacctggcaagtctttaacacgaccgccacggatcaggatcacggagtgttcctgaaggttatgaccttcaccgccgatgtaggaggtgacttcaaaaccgttagtcaaacgcacacggcaaactttacgcagtgcggagtttggttttttcggggtggtggtatatacgcgggtacatacaccacgtttctgcgggcaggcttccagtgcaggaacgttgctcttagcaaccttcatgctacgtggcttgcgaaccagctggttaatcgttgccattattaaaaaagctcctgggtttttgcttcgtaaacacgtgataaatccccctcgtatgcactaagggcagagtacgaggacgcagaattttatggctgactacctaaggtgtcaagaaatatacagcattagtcgtattaccatgccaagtgttgacgatgtttagtggttaaatcgacgaagtgagtatagccgatcgctagtattttgtctgaattttgaccaaccaaaccacgcgcagccagatcattttccagaacatagagagaagctaagttatttaacaatatgttaagaacatcggcgtcttttaacgtcgctagcactccatcctgcaaaaacagaatggcatcttcgtcggtggtcagtctcagcagcgcggataaatcgcattgaaaaggtgaacggctgaaggtatacaacatatttagtatcctgatacggtcaaaatgtcagcacaacgtcgtaagcggctaactgttggcgtaacttttcaggcgctaacacttcaacatccaacacccaatctttggcctgagccagaccgcgttgccgtaatgcctctgcgcacatataacacttttctacgtcataaagtggtaagacaccgaaagtggcaatatagtttctggccagaattttttccggctgttgttgcggaagtaactggaatacgccatccgagacaaaaaacacgccgatatcttcgctgagagccgaagccgccaatagcgcgtctagtccttcccggccactcgcgtttccgtgtgggccttgagtgaaaacaaaagcgatagatttcatgcccatctctaaaattgcgcgatcaaaattgaacaacgcggtcacaggtcagcgccgcttcggccagcgaacccaatccgctcagagtaaaaccgggctgtagattggcggcggccagatcaagctgctccgcctcatgccgatcgcagattcctcgccgcaacgccgcggccacacacacattgagctcaatcccattctgctgcgccagttgttgccacgcgcgaaccagatcaaactcatcgctggcaggcgaagtcagttgattggcgttcagcaccccttcccgatagaaaaaaatgctgaccaattgatggcccgccgccagtaacgcctgagcaaactgataagcactgctggcctgctgagtaccataggcagggccggtaaccaataggcagtaacgcagcattagcgctcgtgcccgataagatcgccgcttttgaactggcgaatatacagataaaccgtatgcttcgagatattcaaccgctccgccacttggttaatggcatctttaatatcaaaaatacccttctcataaagattgagcaccacctggcgatttttcgcattgttagacacattgcgatccgcattcacctcttcaatggtgaattccagcgtttgcgccaccagatcatccaccgatgacgcaaagttgacggaagaaggaacttcctgcgtttccggtggcataaatgtctgaataatttgtgagaaaggcacatccagattcatgttgatacacagcaagccaatcactcgctgaacgcgattacgaatagcaatagtgacggatttcatcaatacgccgctttttgcgcgagtgaaataggcgcgagagacgctactgtccgcaccggccatatcgtgcagcatacgcagcgccagatcggttatcggcgaaccaatctgacggccagtatgttcaccgttggcaattctgacggctgaacacttaagatcttccagcgaatgcagaacaatttcacaatgtccgccaatcaacatggccaagccatcaacgacggcctcgtatgatttcagtatttcataatctgtttgactgaacggacgttcatccagtaaatccagttcactggtttcgccagttaaaagcgaattagacatcgaagacaccaccctctaggtagagcctgtctcaatagcaacgggcagactcataactcaatatcttggaatataagcttagcaaatatgccaaagctaaatccttgcgtttgtgcgtggtattgacgttaagcccacaacccataagcgtcaagttatccaagagcagaagcgcaaaatgaatcagcagaatacaaaaaaaaaccgccgcgaaagcaattcgcaacggtctgtgctgttcgccaaagcgatactaagctatttccgaattatttttgggcttttgcttcagcttctgcggcggttttttcagcagcgacgtcggctttaggagcagctttcacatccagcaattccacgtcgaataccagagtggagttagcggggatccccggaacgccggttttaccgtaagccagttctggtgggatgaccagagtgattttgccgcctttcttgatttgtttcagaccttcagtccagcctggaataacgccgtccagacggaaagacagtggctcgccgcgtttgtatgaatcatcaaagacggtgccgtcagtcaaagtacctttatagttaactactacggtatcactgtctttcagcgcgtcaccagcacctggtttttcaactttatacagcaggccgctcgcggttttcttcacgcctttttctttagcaaaagtatcgcggtacttggtgcctttatctgaattttctttcgcatcttgcgccatcttggcctgagccgaggatttcacacgagcttcaaaaccttgcagagttttttcaatttcttcgtcagtcagcttagatttattggcaaaagcgtcctgaacaccggcgatcaactggtctttatccagtttgattcccagtttttcttgttctttcagcgagttgtccatataacgacctaaggatgcacccagtgcatatgcagattgctggtcgtcatttttgaacttgctgttagtcgttgctgccgcgtcaggagtttttaccgcgtcagcagccatagcctgagttgcattcagggtcaatgccatggttgtagccagcaaggttactttaaacaatgatttcatccatttctccaatggctcagggcttcttaccccaagcaacgattgtgtatgtttcagtactataactgccggagcgaagacaaaacaatctccgaatctacagtatgcagtgatatttcgactttttttatcacaagaagtttcctttttattgttctcactctctgcgcaaggcattccgcggcgtttacaggtagaatctctgacatcgctgtcgctccggcatgcggccatcgcggcaggaatcgatgacagaatcgtcgttagcagttatgagaggaaatactatggaagcgtctttgttcgaacaacggcttgaaatgctggaaagtcgtctggcgtttcaggaagtgacaattgaagaattgaatttgattgtgactgaacaccagatggaaatgaccaaactgcgggaacacctgcgtttgctgacggataaattacgggcctcccagccttcaatgttggcatcacaggcagacgaaacgcccccacctcactattgaggtttatttgcggcacaaaaaagccagccttgcggctggctttttcattgacgatcgtgatgccttagtggcaaccacagccgcctttaccgcaaccgccgccctgttgagcgtggtcatggccgtggtcatggtcgtgatcgtggtcgtgaccgccgcagcagccgccgccgtgttcatggtgatgatcgtgctcaccgtgtacgtggccgtgttgcagttcttctgcagtcgcttcgcgaatggcaacaacttcaacgttgaagttcagatcctgaccagccagcatatggttaccatcaaccacaacgtgctcgtcttccactgcggtaatttctaccggtactggaccctgatcggtgtcagccaggaagcgcataccgacttccaactcgtcaacacccataaatacgtctttcggtacgcgctgaaccagattttcatcatagttgccgtaaccgtcatcagcacttacacgcacatcaaaacggtcgcccgcttcgtggccttccaacgctttttccaaaccggaaatcagggagccgtgtccgtgcaggtagtccaacggcgcactcaccggagactcatcaactaacacaccgtcttctgtacgtacctggtaagccaggctgaccactaggtcttttgctactttcatgacatctcctacccttggaacaaaaattggcacagattgtagcggaaatctgaacccctgtacccttcagcataaaaaatcgctgaggataacgctactttggatcaaaaataccgataacttgctctttcgggcggacatgctgattgacctgctcgtcagtttgacgctgatgatggccacacttcacacattccacgacttccacctgatcttcacgccataaagcgagagtatccatagccttacactgcgggcaggtagcgccggcaataaaacgtttacgggttacagacatgctgatttctccggtttactcgtgttcatcccagccatcaagctgcctgctttcatgcagcatttctcgttggaaaatatcttccagctcgcgacgggcctctttgactctggaaatctgcgccacatcgccatggtgcggcggcatcagctcacgcagcatacgcatatccaaacgacggaaatgctgctgcgcccgataagcctgatgcgggtgcatacccagttgtcgtaatgttttacgccccagttccagcgcactggagaaagtttcgcgggtaaaatccttcacgccgctttgcaataattcatgtgcttccacgcggcctctggcgcgggccagaatatgtaaattggggaagtgttgctgacataaatgcaccaatgtcatggtgtcttccggctcattacaggtaatcactatggctttggctttctccgcgccggcggcacgcagcagttctagttcggttgcatcgccataataaaccttataaccgtatttgcgcatcacgcctacggcgctaacgtcccgttccaatacggtaatacgcattttgtttgccatcagcagacggccaataacctgcccgaagcgcccaaaacctacaacgataacctgcggatcgttgtcttccacgaaaggtttttcgtcgctttcttccggagcgttataacggcgagacagaatacgatcgataccttgcatcaataacggtgtagtcatcattgataaagtcacgaccaccagcagcagcgcgagttgatcgacacttaatacatgctgactaaaagccgcagagaatagtacgaaggcaaactcaccgccctgactcagcacaccggcaaactgaagccgcactgaacgcctcaggccaaaggctctggccaacccataaagtaccgtggctttgatggaaaccagcgccaatacgccaagtaatacttccagcagatgggtaaagataacgccaatattcagcgccatccccactgagataaagaacaggccgagcaataagcctttaaaaggctcaatagcgatttccagttcatgctgaaattcactttccgccaacaggattccggcgataaatgtccctaacgccatcgacaggcccagcgcatccataaatattgccgaacctagcacgaccagaagcgcggcggcggtaaacacctcacgcacgccggaggcaacaatataacgaaataacgggcgtagcaggtatcgccctccgatgagcatgccagcaaaagcggccactttcagagcgattctcgcccaatcgttagcgcccccaccgccgcccgccaaaatgggaatcagcgccaatgcgggaataacagccatatcctgaaataacaatacggagaaaccaagttggccgccttcgttacggttcatccctttttcacgcataagctgaagtgccattgcggttgaggacatggctaaaccgatgccaccaatgaccgcggcctgccaggcaaactgagtgaaatagagcagcgcgcccaaaaccgtcgcggtgatgatcacctgccccgctccgacgccaaaaatagagcgcctcaattgccagagtttggctggattaagttccagaccaatgatgaacatcaggaaaacaacgcctagctcagaaaaatgcagaatctcatccacatcgcgaataaaacccagcccccacgggccaatggcgataccggcaatcaggtatcccaataccgctccaatacccaatcgttgtgcgataggtaccgcaacgacagctgcaaacaaaaacagtaaaattgcggttaatagcgccgagccttccataattatggcctcccttgtggcaacggagaagctaaccactcggcgtaggcctgcgcatggttggacaacacttccggcttttgccgacgcgcccagtaaacaatcatcggatttatccaatgcatatgacacatagacgcagtcaattcgaacgggcgcagaatgtcatccatcggatattggttatagccgccgactcgatatgtcccttccggttcgccggtggtaatcaccgaacgccagtattttccccgcagagcatggcctccgacgccattggcaaacccgcgcgccagtacgcgatccagccattcctttaataaggccgggcaactataggtataaagcggatgttggaagacaatgacctgatgctcacgcagtagctgttgctcgtgatgaacatcaataaagaaatccggataatgtgcgtaaagatcgtgcacagtgacatgcgctagctgctttaccggttgcagtaaaacccgattggcgaccgagtcctgtgattccggatgggcatacagcagcaaaaccttcggcggctgtgacatcattcccctccaaagcgtcgtcagggtgcgggttttccgttaccatgcgtcgcaagacttaaaatagggcgtttaacgccctgtttgtacccaaagtagaagtagtgggtattgcagattaggctagaaactaatgcctctgcgacctcaggtactaagggttaccttaatataatgacaatttaacatactctaaacatacggcactctatgattgttttctcttcgcttcaaattcgacgcgggactcgcgtcttgctggacaatgctacagcgaccgtcaatccgggccagaaggtcgggctggtaggtaaaaacggctgtggcaaatcgaccctgctggccttgctgaaaggcgaaatgagcgccgatgggggcaacgccactttccccaataactgggcgctggcctgggttaatcaggaaaccccggcgctagatatgccagcgatagagtatgttatcgacggcgaccgtgaatttcgtcagttggaatccgaattacaggccgccaacgaaaaaaacgacggtcatgctattgctacggtacatgggaaactcgatgccattcaggcctggaccattcagtctcgcgcagccagtctgctaaatggcttaggcttttcgcaggatcagttgcagcagcccgttcattctttctctggcggctggcgaatgcgccttaatctggcacaggctctggtatgtcgttctgatttgctgctgctggatgaaccgaccaaccatttggatttggacgccgtaatctggctggaaaaatggctgaaaagctattcaggtacgctaatcctgatttcccacgatcgggatttcctcgatcctattatcgataagattctgcatattgaacagcagtcgctaaatgaatataccggcaactattcatctttcgaacgccagcgtgcgaccaagctcgctcagcagcaatcgatgtatcaacaccagcaggaaaaagtcgcgcatctgcaacactatattgaccgtttccgcgctcaggcgaccaaagccaagcaggcacaaagccgaattaaaatgctcgaacgcatggaaatgattgcgccagcgcacgttgataacccgttccgctttagctttcgcacgccggaaagcctgcccgatccgctattgcgaatggagaaagtcagcgccggctacggcgataaaaccattctgcaatctattaagttaaatctggttcccggctcccgtatcggtctgctcggacgcaacggggcaggtaaatctacgctaatcaaattgctggctggcacgctggaaccacaaagcggtgagatcggtttgtcgaaaggcatcaaactaggttacttcgctcagcatcagttggaattcttacgtgcggatgaatccccgctccagcatatgagccgtttggcgccgaaagagccggaacagcaactgcgggattatctgggcggctacggtttccagggtgatcaagtcacagatccgaccgctcgattctccggtggagagaaagcgcgtctggtattggcgctgattatctggcagcgccctaacctattgctgctggatgaaccgaccaaccatctggatttagatatgcggcaggcactcaccgaggcgctaattgattttgaaggcgcattggtcgttgtttcccacgatcgtcacttattgcgttctacaactgacgatttgtatctggttcacgacggcaaagtcgagcaatttgacggcgatctggaggattatcagcagtggctggtcgatttacagcgtcagcagtcacagcaaggtagcccggaaaaagaagtctctggaaatagcgcccagcagcgtaaagaccaaaaacgccgcgacgctgagttccgcacgcaaacccagccactgcgtaagcaaatcatgacgctggaaaaacaaatggataagttgagcgccgaactagccgccgtggaagatgaattggcagattctgcgctgtacgatatctcccgcaagagcgagctaaccgaatgtttgcagcggcaaaatcaggtgaaatccaaactggaagaaaccgaaatgaattggctggatgcccaggagcaattagagcatctgactaaggaatttgaagaaaattaagcgtttccaagctgaaaactgccgctattcatggatgatcgcggcatggaaaaaattgatatcagcattattgtgccggtgttcaacggcgaagcctatcttgccacgctgcttgattcattgagcagtcagtcaggcgtatctttcgaaatcatcgctatcaatgatggctccagcgacggcagcgccgccatactcacggatcgcgcccgccgtcactcttttctgcgcgtcatacatcaacccaatcaaggtttatccattgcccgtaatcagggcattgctcaggcaaaagggcaatgggtcgcatttgccgattgcgatgactggctagcgccgaacgcactgcaaatctggctacaacaggccacagaacagcagttggatctactgattggcaacggctatcgtttctgcggcgaacccactcagcagagcgtcaaacctttattacccgaacaacgctggcaaaagacgctcaccggaaaacaatggattatccacagcgtcgcacaaaacaactggctgcatttttgctggctacaactgatccgtcgagagctaatccaggcgcatcaattaacttttacgcctcatcagctccatgaagatattttatggaccactcggctggcgttagccgcacagcgcgtaaattactgccctgaaccgctttatggctatcgcaccgcgccccactccatcaccagaaaacactgttttcatctaagaatgttacgagcagcgagttatctcgatattatcagcgaattagtccgtattgcggcgcaatcagagccagtgctgagcaaggcactgctacgccacgctaatcgagaaagcggccagctattaggcttaacccgttggcaaaccagaacctgcgcagagcgtagccagcttgccagacgtttcaaagaattaggattggaaatgcccttaatccggggagcgatcggcctgcgggatttctggcgggcgctacgttgcattatcattttccgccgctacgccagacaaaaaccttcacttaaggccgataaaagggtttgtcaccgaggatcgtggcccgatgcataatccgacgctccggcaaataatccgcattggcgtaatgctgggtaacccgattatcccaaatagccacgtcatcctgctgccaacgccagcgcacctgaaattcgggtttcgtcgcgtgagcaaacaggaatcccaacaaagcctcactttctttagcgcttaattcattgatttttgtcgtaaaaccttcattaacgaataacgcctgacggccactgaccggatgggtgcgtaccaccggatgcaaaagcggcggattcttctctttcgccagcagccagcgttggtgatcttccagcgtagcccgatgcttatgctcagggaatgatttagtaaaatcatgctcggcctgcaatcccgccagaagctgcttaaacggggcagatagcgcctcgtaggccgcgatgccgctggtccatagagtgtcaccgccggtagcaggtagatgcttcgccgccagaatggcacccaacggcggattggcgatgaaagtcacatccgtatgccagttatcattatccggcggattatcatcgtgagtatccagtacgataatttcctcacactctttgacgtgcggataaactggatgaatatgcaggtcgccaaaacgccccgccaaatctcgctgctgcaacggcgttatcggctgattacgcagaaagagcacctgatgtttgagcaacgcatgataaagctgctcaaattgactatcgcccaatgggcgggaaatatcgatattttcgatttgtgcgccgatataaggcccaaggggattaaccactaaacgttcgttcattgttgcactccgtaccaaggggttaagcggcgctgaatggcccgaagccctaattccatgctgaaagcgattattgcgattacgccgataccggcgataaccacatccgttgctaaaaattcaccggcagactgcaccataaatcccagacctcgcgtggctgcaatcagctcggcggcgactaaagtagaccaacccacgcccagaccaatgcggatgccggtcagaatctcgggtaaggcactcggcaataccacatgtcgtaatacctgccaacggttggcacccaatgcttgcgcggctctgactcgcacctgcgctacgctgcgcacaccggctaccgcagccagagtaataggcgcgaaaatggctaaataaatcagcaaaatcttggatgtctcaccgatgccaaaccaaatcaccatcagcggtaaataagccaaaggaggtacgggccgataaatttcaatcagcggatccaatatgccgcgtaccgtcggacttaatcccatagcaatgccggttgggattcccagcgcgattgccgctaataaagccagcataatccgcccaaggctggcggctaaatgctgccacagcgtagcgtccataaagccttgtgggctggcaatggtcatgagctgatgcagcacttgctgcggcgcaggaagaaagagcgggctaatcagttgcagcgccgtaacgctccaccaaatcactaatatcagcgctaacgtcagcaaacttaaccctaaactgcggggcaataactgcccgatagagcgaacgaatcggcggctaattcgccctgaagatgccgtattcggtgccgaagaacgcaatgtgctgtgcaggctcatatcaaagcctctcgctgctggaatactttactcagcacatattcacgctgagcaatgaattctggatctgacttaattgagcggcaggcttcgccattggcatatcgctgaccaaaattgagcgtcaaccgttccaccacctgccccggccctgacgataacaacagtagctcgctggctaaaaaaacagcttcttcaatatcatgggtaattaacagcacctgcttaccggtatcgcgccaaatattcagtaacagttcttgcatctgctcacgcgtgaatgcatctagcgcaccgaaaggttcatccaacagcagcaagcgcggatcaaccgccaatgcacgagctattccgacgcgctggcgcataccgccagagagctgccagataaagtgatgctcaaaaccgcttaatccgacctcgcccagcattttcaacgccgtttcacgtcgctgcgagggatccatgccagccagttgaagaccgaattccacgttgctaatcacatctcgccacggcagcaatccttcatgctgaaacaccacgccgcgatcggcacccggcccagtaatcggcacaccgtctaaagtgatacttcccgccgagggttgaataaagccggcaatcaggttcaataacgtggtttttccgcatcctgatggcccaagcaccaccaccagttcgccggaggctatatttaacgacacattttttaatgccgcttttccctgatattccgcactcaggccgctgacgtttagcatctggcctcctaagactgcggcgctgcttgtaccgctttaacaaagcggtcggtaacgtaatcgctgtaatcctcagcaacctgcggaattttcccctgcgctttcaggaaggcggcagtatcggcaatcgccttatccacgggtttgctcagttgggtaatttgctcggctaccggtaaataagtatttcccttcactaattcgggaatctgagcttccggcacgccgctcaaacgggaaagctgttgtagattttgcgcgtttatcagccattggttcggttgagacaaataagcctgctgcgcatccagcgcgctacgggcaaaggcggtcacaacttcaggatgcgccttggcgaaatcttttctcaccacccatacatccagcgttggtgccccccagcgcccgacttccgccgaatcggtcaacactttgcctgttttcgctaattcatttaccgcaggtgcccaaacataagcgccatcaatatctccgcgctgccacgccgccgcaatggccggcggttgtaaattcaggatagtgacctgatcgggctttatcccccaatgttttaacgccgccaacaggctgtaatgcgttgtagagataaagggaaccgcaatgcgtttgccgatcagttcctgcggcgttttgatgtcttttttcaccactaaagcttcggaactaccgagttgagaagccagcaaaaacacttcaatgggaacctgctgactggcagcaactgccaatgggctggaacccaaattgccaatttgtacatcgccagaggccagtgcgcgcaccacgctggagccactgtcaaatttgcgccaatcgaccttggctccggagagtttggcaaaactgttttctgcctgtgccactttcgccggttccgcagccgtctggtaggccacggtaacgtccaccgcgtgggcagcagtcgttgccagcgacaacaccaataaactcaaagagaaaggtttgaacgccatggtttgctccacttggataaagttgccattcagtgacatcactgcagcaggagcgcaaagacgctcggtatccacagttgtacccaagagagataacgacataaaagaataaaaaaatattttttattcttttgatgaataagagataaataaaacggcagagtgaagctcgagccaataagaggatctggggtgagtatcgctgtcacagacccggagggaaataacctatgagtctgattcagcgcataaaaatcgagatattaattacaacacaattgcgccttgcagaaatatcttggcataaccggcaatcaccgtgcgatcgcctttcaaggtacagaaaagctcgcctccccgatgcgatatttggcgggcatggagactatttttacctaaacgcgcggcccaatatggcatcaaagtacagtgcgccgagccggtcaccggatcttcatttccacccaacgtaaagaagcgcgaaacgaaatcgactttatcgccgggggcggtaacgatcacaccacgccccattttttcgatcagttcgccaatatcaggctgcaaatcatgtacctgctgttccgacgccaatactactaatagtgatttagcctgcaacaccagctgaatgtccacgtccagcagcttagttaaaatgtctggtgtagcaatagcttgcggcggtagagaagggaaattcaaggataacagttcaaaatcttcggcttcgcgcttcacataaagctcgccgctggcagaacgaaagacaatgtcactcaaggccggattgacatggctgaacatcacatgcgccgctgccagcgttccgtgtccgcacaaatccacttcccgcgttggcgtaaaccaacgaatcgcagtttgatccccatcatcccaaataaaactggtctcaggtaaatgcaattccgcagcaatggcttgcatgtgctctgtcgttaacggacgttttagcaggcagacgccagccggattacccagcagaccctcgccaacaaaggcatctacgtgaaaatagttaaaatcgctcaaatcgatatcctatagcagcaaagtattgatgtgattaatgccagatcagaagcacacaggccgccgtcaatatccccatcgagacattaaaggtaaaccaggcgcggcggctacgcagcatttggccgatcacactaccgaagcccaaccagacgataccgcacaccagattgaccaaaaacatacccaagctaatcatcacgatggaatgatcataggcggcaccggccagactgaaactagcaaccgagcctaatcccatcaaccaagcctttggattaagaaattgtagcagccagccttgatacagacgcatcggtttaggcggtgcaacgtcggtttcgagtttttgataggcagaagtggcaactttccatgccaaccacagtaaatagaggctacccagaactttcaatgccagatgcagcgaagggtaaatcaaaatcaggctgcccacgccgaatgccacgaacaacaacacactttgcattcccagcataatgcccaacatcagccaaatggagcgagtaaagccaaagttagcgccagaagcagtcaacaacatattatttggaccaggcgtgattgcggcaacccaaagaaaacctaacatcgaaagaaataaacttagctccatgaaacgggtgcctctcacccttgaaatagatgcgatatatcattgaagctaacagtgtgatattgatcatacaagagcaatagcatgatttaaattcatcttatgtatgagatctttcgcccgctagccggtgccagtaacccacatttacagactctgttaccccgcctgatccggcgtcgaatacgtctccagccgttttggcagcgcctaaacctgcccgatggagattttgtcgatctcgcctggagcgaagatccagacctcgccagagaaaaacccagagtcgtactgttccacggtctggaaggcagcttctacagcccttatgctcacggcctgctgcatgcctgtcgagaacagggctggctcagcgtagtcatgcattttcgcggctgtagtggagaacctaatcgtaaatcccgcatttatcattccggcgaaacggaagatgcccgttttttcctacagtggctgagggacagctatggtcaggtaccaaccgctgccgtcggcgtctctctaggcggcaatatgctagcctgctatttggcgcaacagggggaaaatagcctattggaagctgcggtcgtggtttccgctccactcatgctggaaccttgtgcctaccgtctggaacagggattctcacgggtctatcaacgttatttgctcgatcaactcaaacttaacgcgacacgtaaattattaagctatcccggcagcctaccgctggatttatcccagctaaaaaacttacgccggatacgcgattttgatgacgtcatcaccgcacgaatacacggttttaccgatgcgctggattattatcgccgctgtagcgccctacccctattaccgcagatccgtacaccgctgctgattattcacgctaaagacgatccttttatgacgccagacgttattcccgttcaaacggcattaccgtcgaatattgaatatcagttgacggaacacgggggtcacgttggttttgtcggcggctctataaaacaaccgaaaatgtggctggaacagcgtattccggcctggctatccccttatctggagcaaaaatgattattccatggcaacaaatagacagcgctacgctggaaaatttgatcgaagctttcgtgctacgcgaaggaaccgactatggcgaacaggaacgatcgttggaacaaaaagtggccgacgtacgccgccagttagtcagcggcgaagccgtattggtgtggtcggaactgcatgaaacaatcaatattatgcctaaagcgctatttcgtgccggctcagaagagcaagaataatccgtcactcactctgttatttcaccgtggtgtccaacgcgataccacagtgaaacaagatgacaaaaccgccgctttgccctaaaagtaactatcagctatttttcttcggccattatccccagctcattactggcagataaatcataataatcctttgaaaaatataacaataactcagtaccctacggagcagaacccctatgtcagccaaacatccggtgattgcagtaacaggctcaagcggtgcaggaaccacaacgaccagcctggcttttcgtaagatatttcaacaactaaacatacgagcagcccaaatcgaaggggacagtttccaccgctacacacgcccggaaatggatgcagcgatccgcaaagcgcgggatcttggccgccacattagctattttgggcctgaggcgaatgatttcggtttactggagcaaagcgtgtctgaatacggcgagcacggccgaggacgctcacgcaagtatctgcatacttacgacgaagccgttccctaccatcaggtgcctggaactttcactccttgggagccactgccagaacccaccgacgttttattctacgaaggtttacacggcggcgtagtgaccgaacaccatgatgtagctaaacatgtcgatctgttggttggcgttgtcccaatagtgaaccttgagtggatacagaaactggttcgggataccggtgagcgtggccattcacgagaagcagtgatggattccgtggtgcgttcgatggatgattatattaattacatcacacctcagttttcccgaactcatatcaacttccagcgggtgccaactgtagatacatccaatccttttgcagccaaagctattccgtctttggatgaaagttttgtggtgatccatttccgcgggctggatcaaattgatttcccttaccttttggcgatgctgcaaggttcattcatttcaaatatcaatacattggttgttcccggcggaaaaatggggctggcaatggaattaatcatggcgcctttggtacaacaattattagaaggaaagaaaatcggctgattccggcagagccaatcaatacgtaacctctaataaatgaagacggctatcatttgatagtcgactcttatcagtgaataatccatataaaaataataaacaaaatcataattaaatacatcaacaaattaatcacttttatttaaaataaaacagtgctagtttttattcgcccattactgtttcatacccaataagccatgctggaaaaacttaaggagtgtataaatggaaatagcggatattggccgtactgcacttatagagaccgatagattaagaagaaatggaagctgcgtattttccacatgtgaatatagcaacccgactggcagccatacagatagaatattcattcatgcaataaatgaattggaaaacaatattatcttctttcccacgggctaaaagataatggctcaattgcgaaaattgagtacgcaatcttgcccctagctctaattaccgttttattatgcttttcaatttagttatcggaagcagtgggttagcaaccccctctccggctcagcgttttatcggtattcccaacatgattctctgtgctattggtacagttctatacatcacagtatcaaagaaggtgtttctatatggctggcacacccatgagcgcctaacgctaaggaatatcattacatgactaatcgccgctatttatttaagcaacaatagaaatttattactgatagataaatatcacgcagcacctatttctaggcttattatcgtagaatatatttttgttttttatcttattcagataaccatgttctatttaacaggtattcaggtgtcgctaaatttattaacactacctattttcacattgttattgtcgtacctcgacgaacgtattctgatttcatcaaggagtattttttcattaaggttcatactggcaatgttgctgtttatgtccgtttataaattaaagaccattcgataacatggagttaaacatgattaaagtcgtcattgttgatggtttttcttccggaaaatttctggcgaaggaactatttgatgcgggttgcttgctattacacatttcgtctagcgctgatttacatgattactactattatgggtttgattattcgatctattcgtcgctactcacccatcaaaacttatccgataccaaccaggatgttgcgctattcgcccccgattacatcattgccggagctgaaagtggccttttgctctgcgacgaactcaatcatcgctttggtttgccttttgccaatgactataaccatagcgaagcccgcagaaacaaatatgccatgattgaaaccattacccatgccggtttagctgccgcacgacaaaccaccgccagcgaatggccagccgccgaacgttggattaaatctcatcacggctaccccgtcgtactaaagtcgttggccagcgcaggctctgaaggcgtattcatttgccattctcaggcagaggctgaagacgcatttgttcaaataatgggtagctacagcaaattaaatgcggttaatcagcaggtgttaattcaggaatatctcgaaggcgcggaatacgtggtgaatatggtttcactgatgggcagaccgctggtaactgaagttgtccgttacaccaaacttcgtcttgcttcagggcggattctttatgatatcgatgaaattctggatgcatccttcgagcattatcaggcgctggttagttacactcgccaggtaattgagtcattaggaattcgcaatggccctagccatgcagaagtgatgttaacaacgtcggggcctaaattagtcgaggtggccgccagaacggacggaattctgcgtcctaccatatcggcgcgtaccaccggattggggcaaatttgtgccacggttatggcaatcaccgcaccgacgcagtttctgtcatttaccgaatgccatccgtcataccagctacaaaattactcttacaatatcggcctgattaatagacataaaggtatcttccatcagcaggattttttatccgaacttcttactttaccgtctttttcactggctgatttttatgtagaagaaggtgatgctattggggtcactcaggatgttttcagccagccaggtgctatttatctggttcattctgacgcagaaaccattcgcaatgactatctaacgatcaggcgcctggaaaacgacggcgtttatcttaaaaatgtataggaataaatacgataacagcctgatagaaaatcaaaaaattgaaccgcggcgattgactgcgaaatatgaatcgcggtgagtaagggaacagcgggggatttaacgatttaagatgtttgagtctttgagtctttgagtctttgagtctttgagtctttgagtctttgagtctttgagtctttgagtctttgagtctttgagtctttgagtctttgagtctttgagtctttgagtctttgagtctttgagtctttgagtctttgagtctttgagtctttgagtctttgagtagcagtttccggataaacaggcagtgatacaagcaattctgtacgtatatgaatcctataaatacaacgcccggagcgaataaaccgggcgttgataaatatggtcaggttagagagcgaatttcaaaactgtgggtgattttggcagccttacccaacatcagggctaccgagcagtatttctccgcggaaagctcaacggctcgctcgacggctttttcggtcaaatctttaccactgacgacaaaatgcaggttaatcaaggtaaacaggcgaggggcttcctcccgacgctcggaggtcaattttacttcgcagtcgtgcacatcgttgcgccctttttgcaaaatggacaccacatcgatagcgctacagccaccggccgccatcagcaacatttccatcgggcttggggctttatctccggcgttaccatccattaaaacctgatgaccagaggcggattcacccaaaaaagtcagaccttcaacccattttactcgtgcctgcatacccgtcactccctattagcttttccgaatcagactactctttcattcataaagtggcaatgtaaccagaccctcatcatgctgaagcgatacaacacaagacactggcctcatcctgtgctacaaacagagccgaagagatgtttcttagaataaaaagggtagagatcaagactcagtgaagggtctctatctgagatgtatattggctatacctttcggtagttgagcaaattaatatgctaatagaaagtgtattttataaacacgccgtacagggaactctgagccctgttaagttaggcagcgataacaacagaggataacagcgaatggttctcggcaagccacaaacagacccaactctcgaatggttcctgtctcattgccatattcacaagtatccatcgaagagtacgctgattcaccagggtgaaaaagccgaaacgctttactacatcgtgaaaggttccgttgcggttctgatcaaagatgaagaaggtaaagaaatgattctctcctatttaaaccagggggatttcatcggtgagcttggattatttgaagaaggccaagaacgtagtgcttgggttcgtgcaaaaaccgcctgtgaagtggctgaaatttcttacaaaaaattccgtcagctgattcaggttaatccagatatcttgatgcgtctgtcttcgcagatggcgaatcgcctgcaaattacatccgagaaagtgggcaaccttgctttccttgatgtgaccgggcgtatcgcgcaaacgctgcttaatctggcaaaacagcctgatgcaatgacacacccagatgggatgcagattaagattactcgccaggaaattggccagattgttggctgctcccgcgaaaccgtcggtcgaatcctgaaaatgctcgaagatcaaaacctgatctctgcgcatggtaaaacgattgtcgtttacggcacccgttaattacctaaaaaaaccggttccctgtgcttaacatggcaccggttttttctttgtctgcatatggacgacggatattgacctgatgtggcgtcggctgatttaccaccctgaagtaaactatgcattacggcaaacgctggtgctgtgtttgcctgtggctatcggtttgttgctcggtaatttgcagcttggcctgttattttccttagtccctgcctgctgcaatatcgctggcctagataccccccataagcacttcaccaaacgcttagtcgttggcggaactttattcgccctcagcagttttctgattcaacaattcctgctgtggcatattcccctccccctgattatgtttggcctgactctcattttaggcgttaacggagccatcagccccctgcacgcccgtttattgcccgctgcgctagtcgctgcgatattcacactaagcatgattggccgcttcccaatttggcacactccgctacttttcatcgttggcaccgcctggtacgggctatttaccggcctgtggttccgcctgtggaaagaacagccgatgcgagaaaccctgagccagctatatcgccagttagccgattatttagaagccaaatacagtttgctgactcaacatatcgatccggaaaccgcattgccgccgttgctacaacgccagcagggcgtaatggatttaataacccagctttatcagcaacttaatatgcttcctcatactcataaaagggagcaaaagcggctacgattaatgtttcaggtggcgctggatttgcaggagcacattactgtcagtctgcaccaaccggaagaagtgcaaaaactggtggaacaaagccatgcagaagcggtcatccggcggaatgcgcaggtcattgctcatcgtttgcgggtcgtcgctgataatcttctgtatcaccgccatgaattacagcgttttaccatgaccaacgagctggcagcgctggaaaaaatcgccggacagcacccggataatccggttggccagttttgttattatcatttccgtcgcatcgcgcgcttgctgcgtaaccaacggccgctctatcggcgagatttaatgtcggaccaacaccggttgccgttctggccagcgctcgccagttatctttcgtttaaatccgtcgcgctgcgtaatgccggccgtctggccgttacgctagccgtcggcagcagtttgggaatggcatttaatctgcctaaaccctactggattttattgaccgtgatgttggtcacccaaaacggttataacgcgacgcgggtaagaattcagcacagagccttgggaacgttggtcgggctggttattgcagccggtctgctgcaacttcagcttccacaaggtaccacgctgaccattatgctgtttatcacgctagccgcgtatttggttctgcggaaaaactacggcctggcggtcattgggctgactattaccgccgtgtatacgttgcaactgctggcactcaatggcctgcattttctggttccgcgcctgattgatactctgattggctgtgcgctggcctttgggagcaccatctggctgtggccgcaatggcaaagcggtctgctgcgtaaaaacgctcatcaggcactggaaagcgatcaaaatatcctgcagttattactcaaaaagacgcctaaccttggcgagctggcaaatgaacgaatgcaggttaatcaggcacataacgcggtgtttacttcccttaatcaggcaatgcaggaaccgggctttaactcccgttatctggccgatatgcgtctgtgggtgactcacagccagtttatcgtcgagcatatcaacgcgatgacaattctggcgcgggatcattacatgctgacagagaaactggcggaagagtatttacagcgctgtgaaattgcgttgcaaagctgtcagcagcggttggaatacgacgggccgagcagcgaaaatagctttatgcgtccaccagagctacatccggatatgccaatcaccgaaatggaacgccatctcaggcgcattttgtcccatctaagcgtgatgcacaccatctcgtctttagcctggcgacaacgaccacatcatggcatttggctgagcagaaagcttcgggatagctgagtgtttaaaaaaacactagcggaacataattgaggaataaattaccgggctgatgaggcgtcctaattacaggacgccactgactaacttttggagatgcacatcttgcagttgcccaacgccaagccgattcatactgtctctgtgatgaccacgcaacaaagcggcgacttgccgttattcagcgtctagaactgcggcaacagcctgcgcaaatcgcgccataccctgctcgatgtcttctaattcaatcactaacgatggtgcaaaacgcagcacattcggcccggcgtttaaaatcatcaatccgttggccgctgctgcggtcaggaaatcacgcgccctcccatgatactgtggcttcagctcagcgccgataagcaatcccatcccgcgaatatcggtgaacagatcgtattgcttcccgatagccgttaatgcctccgcaaacaggtcgtgacgctgcgctatgccatctaacacctgtggggtattaatcacatccagcgccgcttctgccactgcacaggccaaaggattacccccgtaagtcgtaccgtgggtgccaacggtcatcaccgaggcaatttcctccgttgtcagcattgcgctgattgggaaaccaccacccagcgccttcgccgtggtcaggatatccggcgtaatgccgtagtgcatataggtgaacagcttgccgctgcgtcccatgccactttgaacctcatcgaataccaacaatgcctgatgacgatcgcacagttcacgcagcccctgcatgaataccggatccgctgcggtgatgccgccttctccctgaatcggctccaatacgacggcgcaggtatggtcgtccatcaccgcttttactgcggctaaatcgttgaaaggcacgtggataatatcagcgggttttgggccaaaaccgtcggaatatttaggttgcccaccgacggatacggtgaacaacgtgcgtccgtgaaaagcattatggaaagcgataatcttggttttatacggactatggcgctcaatggcgtagtggcgcgccagtttgaaagcggcttcattggcctcgccaccggagttggcgaagaacacccgatcggcaaaggtagcgtcaatcagcttctcagctaggcgtaatgcgggttcattggtgaaaacgttgctggtatgccacaaggcttccccttgctgatgcagcgcagcaaccaacgctggatggcaatggcctagagccgtgaccgcaattccgccagcaaaatcgatatattcattgccttgctgatcccagacccgactgccttttcctttaacgggaataaactgagctggtgcataaaccggtagaatcactcgatcaaacgtgctccgatttaccgctgatttttctgtcattccgctgtccgccttgatgatacgcgctgataccgctcgccattagtgaaaatataatcacaaaatatgcataaaaaatcacaaacaggcaaacaaaaaacgctacgaacacgaaaacaatcgtaatgcattaatttttaaggaaattatccagcagctgatgaccttgctcgctgaggatgctttccggatgaaattgcacgccttccagcggaagcgtgcggtggcgtatccccataatttcatcgaacgcaccgtttcgctcggtccacgccgtcacttcaaagcaatctggcagcgtttctggcgcgataaccagagaatggtagcgagtcacagtaagtggctgatttaatccacggaagacaccctggttattatggttaatagccgtggttttcccgtgcataacctgacgcgctctcacgatgctggcacccaaagcttgccccagcgcctgatgccccaaacacacgcctagaatcggcattttgccggcaaaatgaccgatcgccgccagcgagataccggcttcgttcggcgtacaggggccgggcgaaatcaccagatgggaaggagcgagttcttctatatcagagagttgcagttcatcattacgctttaccagcacctctgtacccaattcgcaaaagtactggtaaaggttgtaagtaaacgaatcgtagttatcaatcagtaatagcattttcaatccaacctaaatcatgaccctgccatcttactgattttcacgtcattcgttgatgagtttgtcgcaaaacctagcgtttacggccaccggtaatcgaacccaatacaccgcgcaaaatttgccgccccaaatctcgcgccatgcttttagccgcagtttggacaataccatcacgcttgccgccgcgcgggccggtagaaccaaacagcaaatcgttcaatccagccatcagcccaccgccagctgccggttcattaggcgatgacggcacagttttgcccgcttcggcagcctgtccaaccgtagaaaaaccgtctgcggccagtttttcataggcggattcacgatccaccatttcctcataacgaccgtacaatggcgaatgattcagcgcatgatttcgagcggcatcatctaaagcacccattttcgattgcggcgctatcaccatcgcccgctccacgacgtttggccgtcccttttcatcgagaaaagagactaaagcatcacccacgcccaattcggttatggcttgttccgcgctaaaagccggattggctcgcatcgtttgcgctgccgattttaccgttttctgatcgcgaggagtgaacgcgcgtaaagcgtgctgcacccgattaccaagctggccgagaattttatcgggaatatctagcggattttgcgtaacaaagtaaattcccacgccttttgaacgaattaagcgcaccacctgttcaattttgtccagcaacgccgttggcgcatcgttgaacagcaaatgagcttcgtcaaagaagaacaccagctttggtttctctacatcacccacttctggtaactgctcaaacagttccgccagcaaccacagcaggaaaatggaatagagtttcggctgattaatcagcttatccgcagccagcaggttgataatcccccgcccattgctatctactcgcattaaatcctgaatatccagcatgggttcaccgaagaactggttcgccccctgctgctccaaggtcaataaaccgcgctgaatcgacccgatagaagccggcgagatattgccgtactgagtgcggaaatctttggcgttatctcccacaaactgcaccacggcgcgcaaatctttcatatccagcagcaataagcctctgtcatcggcaattttaaataccaattgcagcacgccgctttgcacatcgttcagatctaacaaacggcctagcagcaaaggcccaagatcggaaatcgttgcccgaaccggatgccctttttcaccaaagatatcccacggaataatcgagcaagcctgcggctcccagtcattgacgccaatcgcagccaaacgagccaagagtttttcagatcccgcgccttcggcaccaataccggacaaatcacctttcacatcggctaaaaataccggtacgccaatgcgggagaattgctcggccattttttgcaatgtcaccgttttaccggtgcctgtagcgccggtaatcaaaccatgccggttggccaaagccggcaaaatcgccagctcaccggttgcagaagcggttcggcctccagttttagcaatgactaacggctgctcactcatttgccttcaccttttttattctgaaacgattttattcagaaacgatagctttatgccgaaattataggcgcgaatctcagtaacatcctctgtttgccaaactgcagccccccgcttgcgagtaaagtatctagctataaaaataccgtaccacatggaaaaacaccggagcggcaaaacataaagaatcaatacgatccatcatgccaccgtgcccttcaatcatggcgccgaaatctttaattccgcgatctcgtttgatcgccgacatacacaagccgccggcaaagcccaataaggtaatcagcaacgagattaatccggcctgccagaagctaaacggcgtcgcccaccataaactggcgccaatcaggctggcgctgagaattccgccgataaaaccttctacagttttattcggacttaatttcggcacaataggacgtttgccaaaaagcttaccgaatacatattgcagaacgtccgaaagctgcaccactatcatcaaaaacagcagcagtttgatattttgattttcatagccgggaatattcagcatcagcagcgctggcgcgtggctaatacagtaaaccgcaatcatcatgctccactgaattttcgccgttcgctcgaggaaatgctgggtatcaccggataaagcaatgcgggttggaataaacagaaaagcgtaaaccgggataaataccgcaaatatcccgtaggcttccataccaaccaataaatactgtaccggcagcataatgaagaaacaccaaaacagcgcttcatgatcgccgcgtcgggttggcgtaagagtgatgcattctcgcagggcaaaaaatgacatcagagcaaataacaccacagaaccaatagtgcccagcgccatcgccagcacggaaataatacacatcaaccaccaggctcgaatgcgggcattcaggtttaaaatagtgctacgtgccgcaggagaaacgttcacgcgggaaagaataaagccaatcaaactggcgatcgtcaataaaccgaataaaccgcacagcagcaattttaattcattatcaaacgccatcatggtgccatttcctctagtgccgctttaattcgcgccagaaaagccgctttatcttctcccgcctgcaagcctgtcaccggtacgccaaaggtcgctgagcaaataaaaggcaccaccagtttggaacctttcggtaatacgcgattgaggttttccagccacacgggaactaattcgacgtctgggcattggcgagccaagtgataaatcccacttttaaagctttgaatattttctccatcaccgcgcgtgccttcagggaataaaattagcgactgattgttctccaacgtttccaatagcggcgtcagcggatttttacgcgcttcagcgcgaccctccaccgtacggcgctccaccagcaccgcgtgaaaaacatacttcgccagataacggcgtaaccgtgttttcgaccaataatccgctgctgccactggatgaacctgactgcgcaaatggcgcggcatgctcgcccagatcaccagcccatctaaatgactggaatgattggcatagtaaattctgacctgtttatctggtaacggagcaagccagcgagctcgaattccggtcagcaaacggcataaagacaccagaatggtcgccaccagtttgctactgagaataaaaggaaatttaatcattaggtggcaattccttccgctggagttcattcattaccgcgcgggtacgtaaaatcgcggtaacaatggtcccgaggccaataatccacaggcagagatataaaatccattggttataggcaggcacaactgcggcaatcactgtgccgagggttaacagagccatgcggtgttgcttagccattggcccactgaattgttgagctaaaccgcagctaccgcccaaaacgcggacataggccgtcattgcggcgaatagtgctgcggcccagcttagcgttattgcatcggtaaaagcggttaaaccgtagcccacgccaattaaaatcaaagtatcggagatgcgatccggtaaatcgttatataccgcgcccacagggcttcgtaatccgccttctaccgcgaccatgccgtctaataaattgcagattaaccgagcctgaatcatgaaagccgcggcgataagcaataggccgctgaccagcgctgaatcctgacgaaaagcgcagaagaaactgagcccagccaatgcagaaaagagaatgctaaagagggaaatgccgttgggcgttgcgccgcgctgttgtaatactctggcgaaggtcgtcgcccacgctgtatttctggcacgtattggccgacgatctttaatatcctgattcatagtcaattaactaccttgtcaccgcagaaaataatccatacaaccctgctcggctaattactcagatactattgtggtgattcctgggctatcccaatatggattctattccggccaacgttatccctaaccaagttgggttaatatacagcaaagatgtggcaataatgaggactaaaaaagcggtgagagtcgcgcttaattcgatgctaagaaagggatgattggacggaattaacgctgagagtagtgaaaaccccgcggctagttattacagcaacggggtgtcgagaactaaggtaaaactttggctgacaggatggtaataggtttaaccggcacgttttggtacggcccgatattttccgtttgcacttgcgatattttatcgacgacatccatgccttttactaccttgccaaataccgcataaccaaaatcacgttgaccgtgatcgaggaatgcattgtccgccacgttcaggaagaactgactggttgcgctgtctttatcggcggtacgtgccatagaaatggtgccgcgcagattacgcaagccgttatccgcttcgttcttgattggctgattggtcgctttttgctgcaaatccgcagtaaagccaccaccctgcaccataaagcctgggattacacggtggaaaaccgtgttgttgtaatatccgctattaacataattaacaaaattctgggtggaaaccggtgccttctgattatcgagcgctaattcaatattccctgccgaagtggtcagcaatacatggggagcagcggctgcagaagcggctggagccatggcagtcagggagatcagcgtagcgaaggtcactaaagtacgtttaaacattacggttcctttctcttagagacaaacaacggaaaagcgccttgattctaaagagctgtccccctcagcgctacccatttaccaatatttacttaacacaacggacatttctgataaaaactcgtgtaattgcggttaatgcccgaaataagccgtttatacatccaatataagtgaatagttttgcaggccagatcacgccttgcccacccattttcatttcatccgccgtttttgcgagcttcatctcgttttgattttggttaatcgttaatcatctacaaatgagagcgctctcattttgaatttacctagtcagagttacgcgatgagggacatggcgacaggatgattagtgcggaatctctgtcggtagaaaacagtagctacccatagacattggccgaaaacctcctcgtagcttcctctgatacatacatgacgaaaaaccggcgagcgcagcggatacaactcgattagatacaactcgattaataggtatgaccgaggaaacggcacattgcttatcgctttggtttatacccggcaacatttatcaatgccttggtcatgtgggattcaatctttacgtgatcgaactttaccctcgccagagccgtttggaggccaacagtgaaaaagtttaaaatcgccattattggtggcggcagcagttatacgccggagttagttgacggtttaattcaacgaatcaatgagttaccggtgacagaattagcactggttgacgtcgaacagggccgtcaaaaagtcgaaatcatcgccgcactcaccgagcgcatgctggcacgccacggcctggagcaggttaaggtcagcgtacatttctcactggatgacgccattcgcgatgccgattttgttctgacccaattccgtgtcggccagctccctgctcgcgccacggatgaacgtttgggattgaaatacaacctgattgggcaggaaaccactggcgtcggcggctttgctaaagcgctgcgcaccattccagtgatgatggacatcgctcatcgggttgaacgtttggcgcccaatgcctggatcattaacttcaccaacccggccggcatcgtcaccgaagcggtttcccgctataccaaagctaaaatcattggcttgtgtaatgtaccaatcagtatgcatcacatgatcgccaatctgcttcacgcgccttacgaagatattcaactgcgctttgccggactgaatcatatggtttgggtgcatgaagtgctgcaacggggcaaagatgtgaccgccgacgtgctgaaaatgctgtgcgacggcgcgtctctaaccatgaacaacattaaagaagcgccgtggccaccagaattcctgcgagcaatgggcgcaattccttgcccataccaccgttatttctaccaaacgcaggatatgctgaccgaagaagtggcggcagcggccgagcgcggcacccgtgccgagcaggttatgcaggtggagaaagagctgttcgaactctatgccgatccagagctggataccaaaccggagcaactcagtttccgcggcggttctttctattcggaagttgccctagagctaattcggtcgatttataataatctgggcacacaattagtagtgaatactgcaaaccgtggtgcaattcgcggtttagcagacgatgctgtggtagaaactaactgtatcgttgatgctcaaggcgcacatccgctgacatttggtcaattacctgactcaatgcatggattaattcagcaggtgaaagcctatgagcgtttaacgatcgaggctgcggtccatggcgatcgcggcagcgcattgctggctctggtcaccaacccactggtcgccaatgccagtatcgctcagcctctattagaggaggttttggaggccaataagccttatttacctcagtttaaatgatgtaaagggataacaacccgctttcaaccgccagttttgctggcggttgaagtttggaaaaacaggagcagcacatggttacgctggaagacgtcgcggtactggccggggtatcccgagctacggtttcccgcgtggtcaacggtgataccaacgtcaaacccctgacccgagaaaaagtcgagcaagcggtggccgtattgggctatacccccaatcctgcggcgcgcgcattggcatccagtcactctaatactctcgggttagtcaccacctcttaccgtggtggattttttggcgcgttgatggattttgtacaaaccgaagccgaatctcacggcaaacaattactggtgacccaagggcgagataacgccgagaaagaatggcaagctattcaacgactgtttaacctacgctgcgatggattaattctgcacgttcgcttcctcagcgatgagcggctcagacaattggcggccacccagcgcccttttgtgttactggacagactggtaagcggtctggaagaacgctgcgttatctttgatcatcgccgcgccagccagattgccacacaggttttgatcgacgccggtcataaacgtatcgcctgcatcagcggctccgctgaacgtcagtctagtcaattacgattacaaggttttctggatgcgatggccgcagccgacttaacgccggtcgcctgtctgcaaggggtttacgatctggaaagcggctatctgcgggcggatgaagcgctgcgccagtctcaagctccgacggcgatttattgctgtaatgaagaaatggctctgggcgcattgctggctatcaataagcatcatttgcaggttccgcaagatatctctctgctgtgctacgacagcggcgaacgcgcgccttttgtttctccggcactcaccagcctacattttccaattgtcgaaatggctcagtacgccacgcgtttgttgattaacccgcaaacgcccgccatgagcttcgtccccacggtgataacccgcgaatccgtattaccgccgaaataagcctcaggcgtgacggcaaccaaaccgccacgcccttggttatctatgcgtttctatcagaaagtgacgttgagctttgcccaaatagttcgcccaggctcattcaccggagtattggctgaatagccaaagccgctattacccgccaaattaaggtgctcgctgtaatccttattcagcaaattatcgataccagtactcacttttatctgcgggttaaacttataggccacgttggccgaaagtacgccaaaaccggcgctgctggcaaaatccttcccaaccacgttaccttcgttaattgcgacccggtgctggctactgaccaaacgccacagcgcggtgctgctccaattaccgttctcataagtcagtccaaatcgggcttctaatggtgaaatctgcggtaatggtcggccgtcggtattattttgcccacgggcataagccagactggcatcggttttccaacggtcattaaaggcataagccatcccagcctcaccgcccataatggtggcgtcgatattgtctgcctgactgatccgcagattcttaggatcgtatttgaacaggatgaaatcattaaccttcccagcgtaggccgaaacccaggcgttaaactgctcaccgctatactgaccgccgatatccaattgggtggttttttcacttttcacaccgtcaaaagcgctggcagaaccggtaggcccaaaggtcggggaaaatagctcccagaaatcggggaaacgttcggtatgaccgatgcctgcatacagcatcaccggcgaatcagccaaattatgctcaaggcggataaaaccggcgggtagcgtggcagtgcgctccggttcatcagcgcgtttatagttagtgactgaatgatgatcgaggcgagcaccaacgatcgctttatcctgctcattcatttcccaggtcaactcactaaacacgccgtaatgagtgaaactggcgtttttgctccagtgggttttattgtttttacgatgagtatcggtttgcgcatcgcctccggcctctagtttgatatcctgccagagccaggttcccatcatgcgcccaccgagggtgcggcgatccagattactggacatcgccatatgcggtggcgtacgtaaggtactgttatccatcacatgattgacatagttgtaatagattttggcttcaattttatccagcacttcgccaatatgatttttctcaagacgtagccccaggctttctcgtttaaactgagaaccatccataccgcgtccggcgtaccgcgcctcgccatcgcctttacccatcgtcatttccaacagcgtatcttcatccggcgtccagcctagggcaagatcggcattccacttatcccagcgggatggcacccgattgcctacaccgtctttatagtcgccagcttgggattgattgcccatcatgcgcaaataaccctgatcgccgcctaaactcaggtcgagatttttgtcccaacggccgttggaacccaccagcagactcccattaccggtcacgccggtttgctcaaagcgtggtcgttcacgttcaaacagcacggttcccgcagatgctcccgcgccccacagtaccgactgcggcccttttaccacggtcagcaaatcgtagctttctggcgaaatataagaggttggcgcatccattctcgatggacaggtgccaagcgtctccgcaccgtcggttaggatcttcaagcgggaaccgaacatcccgcgaaataccacatcaccattggtgccgccgttacgaatctgagaaaaaccgggaatggttttcagataatcagcaccgtcgctggccggaaccggttggcgcggcgttttaggcgatgtcactatggttaatggtgaatactgcggcgcggtgacggtaatcacttcggcatcattcggttgattcacaacattcgacgcaggctgatggcgaacgtcagacgcactgatagcgctgaaagccaataatgaacaggaggacgctatggcgtaagccagtttgttttttttgcaggtgttatatttgttagacattattattcctaaaacgaaataggttcatccggcaaggttttatccatgccattagaatggttatttggttattttcactatcaggaataaaaaactggcggggcgcgtggctgtaatttggaataaacgtctttggtgacaataggttctgaaataaacaaaaccggcaacgtcgcggccaataaagacacgctgcgaatatcaggtttatccgtcgcattcagtaacggcagatggatcagcagcaggcaataatcacaggccgcatggttcatcatcggcgaatgattcgacatcggcataacgtcggaatgattcattgccgccatcgctaccgaatcatgataagagttggatgggtgtgaatgataatcagacatggccgaatcatcggtgtcgatgttcggtagcagtgcggctgaatcggcgttttgagcagaggccagcgttatagacaccatcggcgctataaacagcattaatattgcgaatatccccaaccaggcagaaaaacgccgtcgctgataacctatccggctcaacgtcacgcgctgcccaagggtgtcaatcccttcaccaaaacaatccctttatccagatgaataataaaatatcgatatcatggcctcagagcattccaaccctgagttttcccgcactgaaaaatagcgctgacacgaaccataataaaggcaagagcttactggagataagctcatccggtggttattaacgcattttatttgtgatgactcgccatttttcatcactaattttcatgtattgcactaaaattcggatacaagtcacaaaaacgagccatgcctgtgctaggattcgccgccttagcgctgaaaaccggtttggttccgttttagccctatgccagttaatcctaactcgtcttttattactgacacgcaggccctatctatgaacaacagcaatcgcattcggctcacatggatcagttacttttcttacgcgctgaccggtgcgttagttatcgtcactgggatggtgatgggcaacatcgcagagtatttcaatctgccaattgccagcatgagtaacacttttacctttctgaacgccggtattctgatctctatcttcctgaacgcctggctgatggaaatcatcccgctgaaacgtcaacttatcttcggctttattctgatgctgattgccatcgctggcttgatgattggccatagcctgatgatattctccgcgagcatgtttattctcggggtggtcagcggtattaccatgtctattggtaccttcctggtaacccatatgtacgaaggccgtcagcgcggttcacgcctgctgtttaccgattccttctttagtatggcggggatgattttcccggtggtcgcggcgatgctgttagctcgcagcgttgagtggtattgggtttacgcctgtattggtctgttgtacctggctatttttgtgctgactcttttctccgaattcccggttctgggccacaaagcgaccgacgcgggcaaacccgtagcgaaagaaaaatggggcatcggcgttctgttcctggcgattgcggccctgtgctacatcctgggccagctcggctttatccagtgggttccggaatacgcgaccaaaaccttcggcatggacatcggtcaggctggccagcttgtcagtaacttctggatctcttacatgatcgggatgtgggtattcagctttatcctgcgcttctttgacctgcaacgtatcgttaccgtactggccgcactggctaccggtgccatgtacatgtttgtgtctgccgaaagcccggagtacctgagctactacattctgactctaggctttgtttccagcgcgatttacaccaccctgattactctgggctcactgcaaaccaaagtttcctcaccgaaactggttaactttatcctgacctgcggcaccgtggggaccatgctgaccttcgtggtcacagggcctatcgtggcagagaaaggcgttcacgccgcgctggcaacggctaacggcctgtatctggccgtattcgtgatgtgtctggctctgggcttctttaccaagcaccgtagccacggccatgtgactcactaaccgtcggtaataaactcattaccctcatcataaaatagtcaccattattaccgccttcccagccagcgccgtgggaaggcggttttatttctcgcgacgaaaatcaataggttcttcatttcccacatatatccggctttgcgctggcagcgtctgcgcgataatttcccccgcacgcagagaatagcgcaccggtacctgccgcctcaccgcttcaaacccattttcagccggaagaatgatcagattagcctgatgcccaatggctaaaccgtagccgcttaaattcagcgttctggcgctattgtgagtcactagcttcagcccgtcattaatttgcccgtagcccattagctggcaaatatgcagacccatatgcagcacctgcaacatattggcagtacctagcggataccagggatcaaaaacatcgtcatggccgaaacagacattaatccctgattccagcatctctttaacgcgcgtaatcccccgccgcttagggtaggtatcaaaacgaccttgcagatggatattgaccaacggattggcaacaaaattaatgccggatagctttaatagccggaataaacgcgaggtataagcgccattataggaatgcatggcggtggtatggctagcagtgacccgagcgcccatcccttctttatgagccagcgccgcaacggtttccacaaaccgcgactgttcatcatcgatttcatcgcagtgtacatccaccaaccgctgatatttttgcgccagtgcgaaggtcttatgcaaggattccacgccgtattcgcgggtgaattcgaaatgcggaatcgcacccaccacatcggctcccaaacgcaatgcttcttccagcaaggcttcgccatcgggataagataaaatcccttcttgcggaaaagccacgatttgcatatcgacccacgggctaacttcttgctttatctccagcatggcttttagcgcggtcagggtgggatcggaaacgtccacgtgggttcgcacatgctgaataccgttggctatctgccatttcagcgtttgccaggcacgctgtttaacatcttcgtgagtcaacaacgccttgcgctctgcccagcgttctataccttcaaacagcgtgccggactgattccacgccggttctcccgccgtttgcgtggtatctaaatgaatatgtggctcaataaaaggtggcagaatcagcccgccctccccatccagcacctcatcgccggaaggcggttgagttagctgctcatcaatgccgataatcttgccctgcgacaggttgaactgccataaaccggggcgatcgacgcgccgcacactgtggataattcgcaccttcttcccagtcatccttcctcctgctgccctaaccgctttgacggtaaaaaatatcgctttcctttagcttacctaactcgcttccccacgttgccttttatttatttaaggtaaaaaaaccacagaactgacaccattcagctaaagatgaataaaatccacaacttatcaaaaaacgttataaatcatcaatctaccaccttagaggtatatgaggggcaaattgatttgcatcaataagcgcaatagcggggagattaaggtaagcgtagaaaactaaaaattgaggcaaaaatgagcaaagtcaaacttgccgtcatcggcaacggaatggtcgggcatcgctttattgaagatttactcgataaagcagacaaagacgcattcgacatcactgtattctgcgaagagcctcgcatcgcttacgatcgggttcatctctcgtcctatttttctcaccataccgctgaagagctttctctggtgcgggaaggattttatgagaaacacggtatcaaggtattagtaggcgaacgggctatcactatcaatcgtaaagagaaagtgatccactccaacagcggtcgcactctctattacgacaaactgatcatggccaccggctcttatccgtggattccaccgattaaaggcagcgaaggtcaggattgtttcgtctaccgtactattgaagacctgaatgcaatcgaagcctgtacccgccgcagtaagcgcggtgccgtggtcggcggtggtttgctgggtctggaagccgctggcgcgctgaaaaatctgggcgttgaaactcatgtaattgaatttgctccagtattaatggccgagcagcttgatcctatgggcggggatcaactgcggcaaaaaattgaacgcatgggcgttcgggttcataccggtaaaaacactcaggaaatcgctcatagcggcaccgaatgccgtaaaacgatgattttcgccgacggcacctcgctggaagtggactttatcgtcttctctaccggtattcgcccgcaggataaactcgctcaccagtgcggtctggctacggcgcgccgcggcgggattgccatcaacgattactgccagacctccgatcccgacgtttatgccatcggtgaatgcgcatcatggcaggaacgcaccttcggtctggttgctccgggctacaaaatggcgcaggttgccgtcgaccacctgctaaaccgggaaaatgccttccagggcgcggatatgagcgccaagctgaaactgctgggcgtagacgtcggcggcatcggtgatgctcatggacgcaccgaaggcgctcgcagctacgtgtatctggatgaaagcaaagaaatctacaaacgtctggtggtcagcaaagacaacaaaaccctactgggtgcggtgctagtgggcgataccagcgattacggcaacttgttgcagttggcgctgaacaaaatcactttgccggaaaacccggacagcctgattttaccgtctcacgcaggcagtaaaccggctatcggcgtagactctttgccggaaacggctcagatctgctcctgcttcgacgtcaccaaaggcgatattattcaggcagtcaataatggttgccataccgtggcagctatcaagtcggcgaccaaagccggtaccggctgcggcggttgtatcccactggtcactcaggtacttaatgctgaactgagtaagcaggggatcgaagttaatcaccatctgtgtgaacacttcgcttattcccgtcaggagctttatcacctgattcgcgttgaagggattaaatcctttagcgaactgctgagcaaatacggtaaaggctacggttgcgaagtgtgtaaaccgaccgttggctcgctactggcatcatgctggaacgattatgtgttgcagactgaattaaccccgctgcaagacactaacgacaacttccttggcaatatccaaaaagacgggacttactcaatcattccacgctccgccggcggggaaatcactccagaaggtctggtcgctatcgggaatatcgggcgggaatataacctgtataccaaaattaccggttcacagcgtattggcctgttcggcgcacagaaagacgatttacccgcaatttgggccaagttaatcgacgctggcttcgaaaccggccacgcctatgccaaagccttacgtatggcaaaaacctgcgtgggtagcacttggtgccgctttggcgtcggtgacagcgtaggcttcggcgtgaagctggagcatcgctataaaggtattcgcactccgcacaagatgaagttcggcgtttctggctgtacccgtgagtgtgctgaggcgcaggggaaagacgtcggtatcattgcaacggaaaacggctggaacctgtatgtgtgcggtaacggtggcatgaaaccacgccacgccgacctgctggccgccgatctggacgaagccacgctgatgcgttatctcgaccgctttatgatgttctacatccgcaccgccgacaaactgcaacgcacctcggtgtggctggagagtctggaaggcggcatcgcctatctgcgttcagtcattattgacgacaaactcggcattaacgatcagttagaggccgatattgcccgtctgcgcgaagctgtcatctgcgagtggaaagccactgtggaaaaccctgcggctcaggtacgtttcgctcactttatcaatagtccattacgcgacccgaacgttcaggtggttagcgaacgcgaacaacaccgccctgcccgccctgatgaacgcattccggtgcggatacttgaactggagaataaccaatgagccagtggatcactgtatgtccattagaggtcattttaaccggcaccggcgtctgtgcgctggtcggggaagaacaggtggcgatatttcgcccttacgaagatgagcaggtttttgccatcagtaacatcgatccttttaccgaagctagcgtgctgtctcgcggattgatagccgaacatcaaggtgacctgtgggtcgccagcccgttgaaaaaacagcattttcgtctacatgacggcttctgtctggaagatgaaagccgctcggtacgtcacttcgacgttcgggttcgcgacggcatggtgcaagtgaaggcttaagcgatctgatgcggcgacacggtaaaaattatcgcgtcgtcgacgatcaaaataattatttttatcttttggatcaattatgtacgcagatactttgaataaatgtgccgctaatgcagcgcgcatcgtaaaactggcaaaagaaagcccgctgggcttttggattagctcggcaatggcgggagcctatgttgggctagccatcattttgattttcaccttaggcaacctgatcgatccggcgctgcggcctttagtcatgggggcaacctttggtctggcgctgacattagtcattatcgctggctcagagctgttcaccggtcacaccatgttcctgactctcggcgtcaaagcaggcaccatcaaatccagccagatgtgggccgtattaccgcaaacatggctaggtaatctgctgggctcggtatttgtcgccctgctttactactacgctggcggcagcctgttaccggtagataccagtctggttcacgctgcggcattggctaaaaccaccgccccagccatggccttattcttcaaaggtgtactgtgtaactggttggtttgcctggcaatctggatggcaattcgcgttgaaggcgcagccaaattcctcgctatctggtggtgtttgctggcctttatcgcttcaggctacgagcactccgtcgctaacatgactctgtttgctctgtcctggtttggtaatcacagcgaggcttacaccatgagcggcatcggccacaacctgctgtgggtcactctgggtaacactctgtccggtgcggtctttatgggtctgggttactggtacgctacgccgaaagatcagcgtccggcagcggtcagcgccactgcgccacaaaccgcgaagtcataattgcgacggccagccctacttcggggctggcatatgccgccacagaattaaggattgctgatggattacctaccgattttctgccaactgcaccacaaagactgcctgctggtaggcggtggcgatattgccgaacgcaaagcgcgcctgctgttagacgctggcgcatgggtgaccgtcaacgcctgtgagttttcgccccagtttcacctgtgggcagaacagaaccggataacgctggtgcatggggaatttgccccagaattattggcagaaaagtggctagtgattgccgccacggatcgggttgaggttaatgcgctggtgtatcaaagcgccaatcagcaacgaattttctgcaacgtggtggacgatcctaaacgcgccagctttatcatgccgtcgatcatcgaccgctcgccgatcatgattgcaatctcctccggcggtaaagcgccagttttggcgcgcctgctgcgtgaaaaactggaagccatgctgccacagcatctcggccagctcgctcgtatagccggtaatctgcgtcagcgagtcaaacggcagttctccgccatgaccgcccgccgtcgtttctgggaaaaactactgtctcacgaccggttggcacagtctctggccaatgacgatcaaactcaggctaatcaattagtcgagcagctctttagcacgccattagaagatcgcggcgaagtggttctggtcggcgcaggccccggcgacgctggtttactgacgctgaaaggtttgcagcaaatccaacaggccgatgtagtggtttatgatcggctggtttccgatgaggtgatgaatctggtacgccgtgacgccgagcgcatttttgttggtaaacgcgccggacatcactgcgtaccgcaagatcaaatcaatcaaatcctgctggaacaagcgcagcaaggtaaacgcgtggtgcggctgaaaggcggcgatccctttatttttggtcgcggcggcgaagagctggaaaccctgtccgacagcggcattcctttctcagtggttccgggcattacggccgcatccggttgttcagcttacagcggtattcctctcactcatcgggatcacgctcagagcgtacgtttggttaccggtcatgccaaagccgacggtcagttagattgggctaatctggcggcggaggagcaaacgctggtgttttatatggggttatcgcaggcgagtgaaattcagcggcagctgattcgccaaggtatgagcagcgaaacgccggtcgctctggtagaaaacggaacctcgcgtcgtcagcgtgtcgtcagtggggaacttagtcaattagcgctgctatctcagcaggttagcagtccaagcctgattattgtcggcagcgtggtcagcctacgggaaaaactgaactggttttcatcccaagaacaaaccaacccaaatatgcagcaggaacaggctgaacaagccggttaatcctgatagttataaaaattgaccatgaaaaaagggacgagcttatcgtcccttttcttattgatgcgattcagtgagaaaacgctcttgaatcgttaccgcttacggatgagcgacaaaaccaatggcttcatacactttcgccaacgtttcttgcgcacgcgcacgcgctttagcagcgccatcacgcattactgactgaaggtaagcctcatcattgcgatattgatgataacgctcctgaagctcgctcagcatgccagaaaccgcttctgctaccgcacctttcaaatgaccgtacatttggccttcaaattgtgcttccagctcaggaatagactggccggtcacgccagacagaatatccagcaaattggaaaccccggctttttccttcacgtcatagcgaattaccgccggttcatcggaatcggtcatggcgcgtttgattttcttaaccacagatttggtgtcttccaacagttcgataacgttattacggttatcgtcggatttagacattttcttggtcggatcttgcaaagacatcactcgcgcgccggctttaggaataaaaggctctggaatcttgaagatgtcaccgtaaatcgcgttgaaacgaccggcgatatcgcggcttaactccagatgttgtttctgatcttcacccaccggcacctgattggtttggtacagcaggatatccgccgccattagcactggatagtcaaacagaccggcgttgatattgtccgcatggcgcagtgacttgtctttaaactgagtcatgcggctcagttcgccaaaataggtatagcagttcagcgcccagcccagttgagtgtgctcgggtacgtgggactgaacaaaaatggtacttttttgcggatcgataccgcaggccagatacagcgccagcgtatccagcgttctttttctcagtaaagtcgcgtcctgacgggcagtaatggcatgcagatccacgatgcaataaatgcaatcatagtcatcctgcatctgtacccactgacgcagagcacccatgtagttgccaatggtcagttcaccggacggctgagcgccgctaaatacaatgggtttactcattttacgcttcctgattttttaaagatgacagcccaatcgtgggcaacagatcggcaaagtgcgttaaaacgcgatccggatgactcgtggcaatagattcgccatagttatatccgtaggtcagccctacgcaagggcaaccggcggcctgagcggccataatgtcattgcgggaatctccgacaaacagcaattcgctggcgcgcagccccagttttcccagcatcagatacagcggagccgggtgaggtttcttctcgacaacatcatccccaccaataaccagtgagaaataatctgcgatacctaaagaagccagcagcggcgcgacaaacggcgtcggtttgttggtaatcagccccatcggcagaccggaggcggctaactgtgccaacgtgtcttttacctgaggaaacaattggctaccgcgctcaactgtctgggcgtagtagccatcaaagagtacgcgagtgcgctggcaaatctcatcctgaggctctacgccagcccaacgcagcgcgcgctcaactaagacgtcggcaccgttgccgatccaggtggaaactcgctccaaacctgctttaggcaacccctgatgctctaatgccatatccatcgcgctggccaagcccggcgcactgtcaactaaagtgccgtccagatcaaaagccagaccgcggatagagttaaattcagtcatgagccgccatcgccaactcgctgcgcattgcgtcaatcaccgcagcgtaatcagatttaccgaaaatagccgaaccggcaacaaacatgtctgcacctgcggcggcgatttcacgaatattatcgaccttcacgccgccatcgacttccagacgaatgtcataaccgctggcatcaatacgttggcgcacttgacgcagtttattcaaggtttcaggaataaacgactgaccgccgaagcctgggttaacggacatcagcaaaatcacatccagtttatccatgacataatcgaggtagctcaaaggcgttgcagggttaaataccaaaccggccttacagccgtggtctttaatcagttgcagagtgcgatcgatgtgttcgctggcttcaggatggaaagaaatatagctggcgcccgctttggcaaaatctggaacgatgcgatcaacaggtttaaccatcagatgcacgtcaatcggcgcggtaataccataatcacgcagcgcctggcacaccatgggacccatcgtcagattgggaacgtaatggttatccatcacgtcaaaatgaaccacatcagcgcccgcagcaatcaccttcgcggtatcttcacctaaccgggcaaaatctgccgacagaatggacggggcaatcaaaaactttttcatccgcttctccaaactttttatctgccccacaaagctcacataggcttcgggaagcacgagggtttgtatccttaccaggcgggaaatcccacttagctgtacagcgccaaaagctcgttcactttgctacgaccaagaatattacggctgatagtgcggcgcgctttcaccacatgtaatgacgcctgatgataccaatctcgcgtcaattcagtatcgtgattagaaataagcactggaatccggttttcagatgaaagctgataagccagacgagccagatttttttgatctgcaatgccaaagttattggtgtggtacgccgtaaagttcgccgttgcagatagcggcgcgtaaggcggatcgcaataaacaacggagccggaagctgcttttagcaaggtttcctgatagtgctcgcagacaaaaaccgcatttttagatttttccgcgaaccaatacaactcggcctcagggaaatacggttttttgtaacgcccgaaaggtacgttgaactcaccgctcaaattataacgacacagaccgttataacaatgacgattcagatagaggaacaacaatgcgcgccggtaaggatcttcacaggcattaaactcatgccgaatcaggtaaaactgatcggaattgttgtactcatcggtaaataaaagacgagagtcacgcacaaaatcatccgtgcgtaacttcactatgttgtagaggttgattaggtcgctgttgatatcggccaaaatatacgattcatactcagtgttcaaaaacactgaacccgcacctacgaatggctcaatcaagcagtctcccgctggcagatggcgtcgaatgtcatcaaccagcggatatttcccaccagcccattttaaaaaagcgcggtttttcttcatgccgtcagttagctacttaataattcagagccgcagattgtactctgtttcagacagcacatcagcgcacaaataaaaatgatttattttttcaggtcttgctgcacttggtgcacaggtttgacccacggttttttcgcctgaacgtcggctggcaaactcgaaatcgccttcttcgcttccgctgaagtagcataatttccactgaccaacacgtaccaaggcttaccatcacgtttagtttcgtaaacctgatagtgagttaatttttgctgtttcgcataggcattcagcgtatcggaacgagaggcgctgcttaactgtaaggtaaagtggctacctggcgcgttcttcaatgccccaccgctgctggctggtgctgcagtatttttggccgctgtactaccagtacccgctgcttgggtatttttatgcgcattagccacaggtttagcggcagttttctgcgcgggacgcgtggtgttatcacgtactgctggcgttttgatctcttttgaagaagatacggtagccggtgccgttggcaacgtcgatgtcaccgcgccattcatattctgtgaaaccgaatccacctgcccctgctgctgagacagtgcatcagacatgtttcccggtaaatcaacgcgctgggttggcgcattaccattcgccattggctgtgcttcagtaggggtggatgaaaccggcggagccgtcaactcttgcggctggccactattctgtacgccgttgccgtcatgaccatcgctggtgttgctcgccgtacccggctgagcgccactgccgttggtcagtgaagaggaatcagaaagattgatatctctggccgcaacgttaggattctgctgagaagcttcatgctgcgttggcgcttttaacgcggaaccgatagcaatgatgatcaacagcaacaccaaaataccaataccaatcatcaaatgctggcgtgagagagcaattttggggccgttcgaagtcttgcgcgaacgcgtaggacggcgatcgctggtatcaggcttcagatcgtcttccggttttaactcatccatctaaaccctccaactcgaggcaaaagcctaccgttgcatacagcgacggtccggcagattaagttgactgacaacaaagagaccagaacggacctttgcgaagaatatgatgtttatagcatacaacatcataatacttatgccatttaccctgccagacactcggcaatagaagcaaggactatctcgtgagagatgccgccgcgtacctctgatttgccaatagcagtaggcagtaccagccggagttcacccgccaatacttttttatcgcgcatcatgtgcggcagataagattctggtgccatctcctgcgggccgctgaccggtaaaccggcacgaaccaacagtcgtttaattcgttcaatatcactggaagagaactgcccgattaatcgggcggtttccgcagccataaccatacctgcggcaacggcttcgccgtgcaaccacactccgtagcccatttcggcttcgatagcatggccataagtatgacctaaattgagtagcgcacgcagcccattctcttctcgctcatcggcagcaaccacttcggctttcagctcgcagcagcggcggatgcagtaacccagcgcatccatatccagcgccagcaacgcgtcgatgttgttttccagccagacaaagaattcggaatcaagaatgatgccatatttgatcacttcggccaggccagaagcaagctcacgagatggcagggttttcaggcaatcgagatcaacaatgaccgaagcgggttggtaaaacgctccgatcatgtttttgcctaacgggtgattaaccgcagtttttccgcccacagatgaatccacctgagagagaagtgtggtagggacttgaataaagcggacgccacgctgataacaggcagcggcaaaaccggtcaggtcgcctactacaccaccgcctaaagcaataagcgtagtatcacgaccgtgcggtttttccagaagggcagaaaatacctgctccagaacgctgagagatttatactgctcgccatcaggcagaatcacctgatcaactcgaataccgccttcctccagcactgcccggatagaatccagatagagaggagcaagcgtttggttggtaaccagcattacctgatcacccgccttcagcggtttaaaagaggccggatcgttaaacaatcctgcggctatcgtaatagggtagctacgctcccctaacgtgacagtaatcttctccatgtcgcgctcagtgaccttcttaacgtaacttaactgacacccgaaggcataagtagaatgctaaaatcaattactttccagcatgttgatgatctggttagcaacaactttcgcgctttgatcgtcagtgcggatggtgacatctgcaatttcttcgtacagcggattacgttcttttgccagtgcttcaagcacttcacgtggaggcgcatcaacctgtaacaacggacgttttttgtcgcgttgagtacgagccagttgcttctcgatcgtggtttccaggtacaccacaacgccacgggctgacaaacggttacgggtttccttagacttcacagaacccccaccggtcgccagaacaatgccctgtttttccgttagttcattaataactttttcttcgcgatcgcggaaaccttcttcgccttccacgtcgaatacccagcccacgtcagctccggtacgtcgctcaatttcttgatcggagtcgaagaactccatattgagttgctgagctaactgacgaccaatagtgcttttgccggcacccataggcccaaccagaaagatattgcgtttctctgccatgtttttggtattactaagactattcgttaatgataacccgccccgccaatcacaccagcggcgggacctaaactgaaacctcataagcgatagtgcgagatcagacggaaaattatctcagcacttctggtagtttggcaaccgaataaatcgttgtacacgtcgtgggagggaaaccatacgtttttatcggcgtatcaacgttacttaaaacctcggagctcaattcggtaacccttgtaagctaaatacgtcgcagcgtcaaacttagaagtccccaatcacacaaaaagttgtagatcatcatcaagaatagactctttttatctattgcctacccaagtgcgctaagtgttaattaatcggggtgtgatgaaaatgaccaactcccgcctgctctgcgcgttggcatcctgtttaaacaaattgcccagcagagggatattggacaaaaccggcactttatttgcaccctgagtatttttttgctgaaagataccacccagaacaatcgtctcaccgtcatgaacggtaatttgcgttttaatttcctgtttatcgatcgccagtgcctcaccttcaccgcgtttaatcgccattccgggcatattctggctaatttttaatttcagggtaatttttcccgcagccaaaattctcggcgtgacctccattcccaatacggcttccttaaattcaatagtggttcccccgtttttgccattggtgacatgataaggaatatcggtaccttgtttgatgctggcggtttgctggtgagaagtcatcagccgcgggctggcaatgatttccacctgattttcttgctccaaagcgcttagctccaaatccaacaggcggccactaatacgcgccacgtgaaacccggcggtcaacgcgctgttttgaataggtaaaccgacgttaaaattatttattttgagtggggcactttgcccttcactggcaggtagcccccagcgaacacccagttcatgcaggctttcactgccgatggtgacgatatgggcagcaagttgcacctgctgtagtggcgaatccaattctgccagccaagatttcataacttctatcgattctgcggtatcacgaatcagcaatctattggtacgtttatccgccattacccgccccttatcggacagtaatccgccctgcccgttgttcaggctggcggcaacatcttctacgttggcatgctgcaaaatatgcgaataattgctgagtaaatcaggttgcactgcttttctggccttagccgcagcttcatcaaccattaacctttctgaagcttcctgtctggtcatcaccaacaggacattcccttcctgttcggcaaccagattacccatgcgcatgacggtttttaacgcctgcgaccatggaacgttttccaaacgtaaactcaggctaccgccgacgctggcggacgtcaccagattcatatattgataatcggctaaggcttgcaatatgacggataccggggtctgttgaaatgtcagagacaccgagggttcacgagcttcactgcgtgttaataagcagaggataaatagcagagatagccccgcccaacgcaaaaatgttattaaatacaacgtggttaaatacaatattggtaaacacataggcaaacatccttttaataccgttgtttcatcctttattacccggttccattagaaaccaggataccggcggtgacatcatcttgcaggaaccgtccattccgctgtaactcatattgatttgccgcagccctatgtgcgttacgcgccagtgactctgaataaattcgccttcagccaaacgacgccattcgccatccgacttttccaaccagacacgatattcacccggtgcgccgactatccctcgcagcgaccattggctcatagcagcatcagcacgctctcggcaggaaagcgtgatgaccggttggaacggattacggagtggaacaaactcagaagtggctcgactgaccgccatcatcgatgccattaccatcaccgacgctattaatagtaagtttttctgaccgtttcttgtcattctcatcctcctcgtactgccctcttaacctcagtctgaggtttaatcccgacgcttccgcagtaatatgtaaatgctctatcaaaaaggggggataaagagctttgaggctccccagcaagtgaatggctccagagtaatccatactgagaagcccctcccattgcgatactcctaccttatttttgttttttacctctaactgttgccatcgtaatacctggccaccggttgcaaccacccactccccaatatggctgattaaagatttagtcgggttttcagccgtttttagttgctgatacaaatgccacgcttcgcgctgctgtccaagctgatccagcgtgggcatctgggcgatatcctgttgccgctgcgccagagaaattcgttgcgtttcaatgtgttccctttcgttgactctgagcaacagctccggtctgatgagcacggcgtagcacgtaaaaccgataaataaggttgtaatgattagccagagataaagcaccccgcccgattgactcatccagcgtagataataattattcatcgaccagactccccgaaatccagcgaaccttgatcgcaaaacccccattgttttctcgctgctgtatatcgtgaacctgcgcgttatcccaatggtttgcggttttctcctttgtctccgttaatttttcatatagctgaccaattgctggatagtcacgacagatggcatcaaaatccgtcgttttttggtcatgtactaattgtgtgatccaacaatctgtcggcatggattgagacagagtattcaacaacacaagataatgctgagttcggcgggagatttgcctatcgcgatggtgatgttctttgagtttttgcaactcagtcacccgtttttgaattcgttgatgcaacgagtccagcgctgattgacgatgggataatttgccgatctccgccccacgctcaaccctttcataacgcaacaaaaaagtaatacatgccaatatcaaggctgtcatcgctaaatgtcctatcagcaaatttcgccataaacgatagcgtgcctgttgtcggctaacgcgccagggcaaaaagttaacttgatacatcggtgtcctccgggcgaatagccaaccctcccgctaaagcaaaagctccgggcaaaataggaagtggcggctgttgctgtctaaaagcaataaaaggagaccagggaagcgtattctcagggataggttcatcgccaatactgctgtaataaacaccgaaagctggctcaccggttggcgggttcaaccgatgtaattccgtcaaaatagccttggtatcgcttccctcctgcgccgtaatcaaaccatagcgaaaaggcatatccgcagaggtagtccatagccattcccgctcaatacggtgaagtagtagatgtcgaggcggtaatttggcggctacggccatataacgaagcgcgcagggtgaaatatcaatcgcatcaggcatgaagtttgcctgctgcaggcaatcctgccagcgagaaatatcctgctggcgagccgcagtgattaacagctgccgttcatcggcgctatttgtgcggtaatccaacgccagagtttggccactcaaaggaaactgccgagcggcggcgttataaataaactggctgcgctcaggttctctcagccgtttatccgggcgaggaaagctttgctgtaatatgcgctgaaccggcaaggcaatacgtaaagaaatatgtcttggtaattgccggcgtaaatgcgaaagcaactcgctcaacgcctctaaatgttgtaaattcccattcagtaaaacgccgtccggtaatggctgttgccaccaatggcgcagttgccagccatatcgtcgcctcaataccgctaacgcccggacgcagttcatttgaatatccagcccaacctgccatattttctgtgcgcacatcttcatcgacctccatatcgagagagcataaaagaacgtatccacggtgcatggcttgcctttatactacggcgcggttgtttataaactgcccaaatgacattgaatgggaaatctcaggtgaagttcgtaaagtattttttgatccttacggtgtgttgcattttactgggagcagcctcgatatttggcctgtacaaatatattgagcctcagctacccgacgttgccacgctgaaagacgtccggttacaaacacctatgctggtgtatagcgccgatggcgaattgatcgcccaatttggtgagaaacgccgaattccgctgtctttaaagcaaattccgcctgaaatggtgcacgcctttattgcgacggaagatagccgtttctatgagcaccacggcgttgatccggtcggtatattgcgtgccgcatccatcgctttagtttctggccgcgcctctcagggagccagtaccatcacccagcagctggcgagaaacttcttccttagcccggaacggactttgatgcgtaaaatcaaagaggcctttctggcagtgcgtattgagcagttactgactaaggatgaaattcttgaactgtatctgaacaaaatttatcttggttaccgcgcctatggcgttggtgctgcggcgcaggtatattttggcaaagaaattaatcagttaactctgagcgaaattgccatgatcgccggtttgccgaaggcgccgtcgacctttaacccgctttattcgcacgatcgtgccgtatcgcgtcgtaatgttgtgttatcccgaatgctggatgaaaaatacattactcaggcgcaatacgatcaggcacgcagtgaacctctagtcgctcattatcatgcgccagaaatcgccttctcagcgccttatctggctgaaatggtgcgtcaggaaatgatcaaacgttatggcgagaatgcctataccgatggttatcaggtttacaccactatcaccaaaaaactccagttagccgctgtggattctctacgagccaacgttttggcctatgacatgcgccacggttatcgcggcccgtcaaacgtactgtggaaagtgggtgaagccgcctggacgcagcaacagattgtcgattctttaaaaactctgccggtttacggcccgctgcgccctgcggttgtgactcagacgacggctgaacaggcgacagctatattagccgacggcagcagcgtcacgttgccaatggccgggatgcgttgggcgcgagcgtttaaatccgatacggctcaaggccctacgccgaaacgcgtgactgatgtagtacaagctggacaacaaatctgggtgcgtcaggtcggcgatatctggtggctggcgcaggtgccggacgtgaactccgcattggtttcaatcgaccccaataacggtgcaattaaagcgttggttggcggttttgactttaaccaaagcaagtttaaccgtgcaactcaggcattgcgtcaggttggttcgaatatcaaacctttcctgtataccgctgcgatggataaaggcttaacgctggcgaccattctcaacgatttgccgattactcgttgggatgccggtgcaggcactgactggcggccgaaaaactccccgccgagctacgatggtccaatccgcttacgtcaaggcttaggtcaatcgaaaaacgtcgttatggtgcgagccatgcgcgccatgggcgtcgattatgctgcggaatatctgcaacgcttcggtttccctgcgcagaatatcgtacattccgagtcgctcgcgctgggttccgcgtcctttactccattgcaggtcgcgcgcggttacgcggtgatggcaaacggtggttatttggttgacccttacttcatcactaaaatcaccgatgaagccaataatgtcctgttcgaagccaaaccgaagattgtgtgcaatgattgcaatttgcctgttatttacggcgacacgcagcgttctgtggtgctttctgacgacaacgtagagaacgtggcaacctcgcagaataataccgcaagcaccgttccgatgccggagctagagcaggtttcgccgtctcaggttaaacaagatagcgatcagcagtatgcaccgcacgttatcagcactccgctggcgttcctgattaaagatgcgatgaataccaacatcttcggcgagccaggttggatgggaaccggctggcgcgcgggccgcgatctgaaacgacacgatattggcggtaaaactggtactaccaacagctcgaaagatgcctggttctctggttatggcccagataccgtaacgtcagtgtggatcggctttgatgaccatcgacgtaacctcggccgcagtaccgcttctggcgctattccagaccagatcgccggcggtgaaggtggagcgaaaaccgctcagcctgcgtggaatgatttcatgaaagtcgctctggaaggtatccctgaacagaaaacaacgccgcctccgggcgtggttaccgtggtgatcgataaacgtaccggcaagctgtctgacggcggttcgggtagccgacctgagtactttatcgaaggaacgcagccgacggaacacgcggttcaggaagtgggtacgacgctcatggacaacggccagagtcaggaattgttctagttgggagccgcgctagccggaaacagttttaacggtattcgcgaataaaaaaccggccagtcttcaggattggccggttttttttatcattccaaaagagaaagttaacgtgaaagagtcgaattaaagaaggcctgagcgaggaataacgcgctcacattacgcgcctcattaaaatcaggatctttcagcaacgccatcatattcgcaatcggccagcgcacctgcggcaaaggttctggctcatccccttccagactttgcgggtacaaatctcgtgcgacgacaatattcattttgctggaaaagtaagatggggccatcgtcagcttggtcagataatcaaaacgcttggcaccaaagccaacttcttccatcaattcacggttcgccgcatccagaacttcttctcccggatcgattaaccctttagggaaccccagctcataggattcaattcccacggcatattcgcgaatcagcaacagatcttcgccgataatcggcacgatcataaccgcttcgcgattggaggggcgcattcgttcgtaaagacgacggacgccgttactaaactcaagatcgaccgcctctacgttaaataagcgggagcgggcaaccgtttcgacattaagaattttaggtttttgcaggtgtttcatgatagccccgaatgaataattcacctctaatatgacgttttattagggcgtaccagcctgccaaaatgtgcttcaggccaatcttttcctgtccagaataatgctaacgtcttgggtgcagggatagttttaaaacttgatcacattgtgcgttaatgagaacctttatcgcaacgccgttagatataatttacccgtttttaacatgacaatcggtttagtcaaaatttagtcggttagaaactggcctatttaggcagcaagaacgttaaagtatgaagatgaaaataggaatatgctgatattacccgcgtattacccctgttatctttgtcgcctaacaggcagttgaagagcccctacaccagatcatatcgctgagcagaatgccgctatacccgctcacgaaataactcttccgtatgcctcgacacgatttttatgcataatatgcattctttcatagagttaacgaggtttggtagcactcggatggggatgggatgagcacaatagtgttgatattggccttactcttgaccagccttgtcgctgttgcattgctatggtggttcaaatatcaccaaatctctgccgttcccgtggcgctcccgtttgtcaaacccacgcatcgtacccttacgcctgaagaacgcgtcgccgtcgagaattacctgcttaatcaatccgaaaatggcacctttaaaaagctgccgggtctggattcacatctggatcaagggcattcgtcctcgtctaacgagctggcgttgatcccggaaagcgataatgtctatgccgtcacccgcgctattacccgctacggcgtggctagcgatgaaccgaataaatggcgttactaccttgatgccaccgaagtgcatttacccccgttctgggaacaattcatcgcgcaggataattacgtcgaagtcattcagacaaaaactatcccattggtgatctctttaaatggtcactcccttaaagatcacacgttggaagccccaacgccgcgagtcgcccagtctgcgccacaaaatgcgtctatccgtaaagaagacagcgaacacgtcgccttggtcaatattcgcaaggaaacgccggaagaacatgcgatttacgggcctaccggcctgagagaagcggcgactatctgtttggctttgctgcttctattcctcagccttattagtcctggggtagtattgccatggctgattcttgtctctatcgccctgctttcctgggcctgctggaagttattccgaccactttcagaatcggatttaaaggaagttcattgcctgagtggcacgccaaagcgttggggattatttggcgagtccaatcaagggcagatgaataacatctctttgggcattatcgacttgatttatccgcctcactggcaggcttatttcgcccacgatctgggtaagaaaaccaacgttgatatttatctaaatcggcaggtcgtccgtcagggacgctatttatccctgcatgatgaaatgaaaaattttccattgcagcgctggggcaaaaacctgacgttaatgctcggttcattagcgattctgatattgctggtcgtttatgttccgctcggtctgccgctaaaactcagcatggcgtggattcagggtgcacaaagccagcaggtcactagtgtacaagctttggaaaagatgccgcttcgcattggcgatatgctgaaagctcagggaacgggtatgtgctatgtgccgcctaacgctctcggcccgcataattttgcttttacgcctttcgattgctctagcatttactggaataccgcatctacgctaccacagcctgagtcggaaactattgaaaaagccgctgcactgctggcgacggtcaatcagcaattgcacccgcaggacagcagcgatcctaacgttaacccacagttagcgacagcgattgaaaagtccgggatgattctgctgaataacttttccgatattgtactgaaaaccaaagagttatgcagaagcgaagccgattgcgtacgtctgaaaaacgccttggtcaatttaggcaacgccaagaactgggcggcgctcaccaaaaaagcacagtctggcgcgctcaaaggtatgaacgtgttattacgtccggtcagcgccgatgcgttggaaagtttggtgaataccgctacctcttccttcgtttaccgcgaaactcatctggctaccgaggcattaaatagcccgccgccgggcggtttcctgatcagcagcgatgaaggcaaacagctggtcaaccatcctattcctgccgttccgctgtttgattacagtgcgttagagcagtggcgagaacttcagcggctctctggtttgctgctgaataccccgtttaaagctgaaggagtcatcaccagcattaccgttgatgccaacggtacgcgtcatgttactttgcatagcgaaccggacgttatcacgctcagccgctatttaggcaccagcctgttgttattcgccttgattatttgcctgtccgtcaacggctacctggtcattaagcgtatgcgccaaaatcgcacccgcatggaagatattcaacgctattatgatagctgctttagcactcaccttaccgctacgccttatcttcgctaagcgccagaatccgcctacgcagcatcagccacgcgcagaccttgtcattttggtatgctaggctaaatattatctgctaaatcgtccgtcgctgttccccctcaaacagccagaatgcctgcttattttattggagtgaccatgccactgaatgttaactggcaagatatcgataccgtattattggatatggacggtactttgctggatctggagttcgacagctatttctggctaaaactggtgcctgaagctctaagccagcagcggaatatccctttggagcaggccaaggcaattattaacgatgaataccacgcggtgcagcacaccatgagctggtattgcttcgattactggtgccaacgactagatctggatatttatgccatgacgacgcaggtcgggtcgcgcgccagtttgcgtcaggatacactgccgtttttgcaggaattacgcgactccgggcggaaaaccattttactgaccaatgctcatccccatagcctgaatattaaagttcagcataccggtctcgatcagcaccttgatttgttactttccacccatatatttggttatccgaaagaagatcagcgtttgtggcaggccgtggctcaacatatcgattttgaccccgccagaaccttatttgtggatgacagcgaagccattttggacgcggcaaaaacctttggtatccgttactgtttgggcgttgaaaaccctgattcaagctgcgcgggcaaagtgtttcaaagccatcccgccatcagcgactatcgccaactgttgccagccattcggcaccacagcgcggcttagcagacaggagattctgtgaaagaaaaatccgctcccgatgacgccgttcgtctggataaatggctatgggctgcgcgtttttacaaaacccgcgcaatggccagagagatgattgatggcggtaaagttcattacaacggccagcgggggaaacccagtaaactggttgaattgaatgcggaaattcggttgcgacaagggaatgacgagcgcacggttcgaattctgtccatacacagccagcggcgcggtgcggcggaagcgcaggcaatgtatgaagaaacggaaaccagtatcgccaaccgggagaaagtagctcaggcacgtaaactcaatgctctgaccatgccccatccggatcgacggccggataaaaaagagcgtcgcaatctgatcaaatttaaatacggcgagtcggaataaccggctgcttttaagagagaaaactatgtctaatcacgaccaattacaccgctatctattcaaccatcatgcggtacgcggcgagctggtaaccgttaatgaaacttatcaacagattatcgcgaaccatgattaccccgcgccggttaaaaagctgctgggtgaactgttggtcgctaccagcctgttgaccgctactctgaaatttgacggcgatatcaccgtacagctgcagggcgatggcccgttgactctggccgtaatcaacggcaataaccagcaggaactaagaggcgtggctcgcaccaacggcgaaattgccgaagacagctcgctgaagcaaatgattggtaatggttatatggtgataaccattacaccagctaaaggtgaacgttatcagggtgttgttggcttggaaggcgacactctggccgaatgtctggaaagctatttcatgcagtccgaacagctaccgacccgcctgtttatccgtaccggtgaagtcgaaggtaaagcggcggcagcgggtatgctgttgcaggttctgcctgccgaagagcgaaatgaagacgaattcgaccatttggcgcagctgacaaccactatcaaggcggaagaactgttcaccctgccagccaatgaagtgctgtatcgcctgtatcatcaggaagaagtgactatttatgatccgcagaatgtcagcttccgttgcacctgttcccgtgaacgatgcatggacgctttagtgactctgcctgttgaagaagtgcaggaaatgcttgagcaggatggtcaaattgatatgcactgcgaatattgtggcactcaccatatttttgacgctgtagatatcgccaatttgctcagcggaaacagcccgtctgacgatcaaatccattaattattctgttctttccgggcacatttactgtgcccggtgattcctgccgtttcacgcttgctataattcgtgtgctatctctcataacctagctaaaaataggtcatttattaaaatctttgatagcaatcgctgttaatcgaggctgaggatttacaatcggtggcataaaaataagacgaccctaggagttagacatgagtgttaaaggaatcaccccgcaagagctcgccgattatggcatccatagtgtaagcgagattgtttacaaccctagttatgagcttttatttcaggaagaaaccaagcctgatctgcaaggctatgagcgcgggactgtcaccaatttaggcgctgtcgccgttgataccggcatttttaccggccgctccccgaaagataaatacatcgttcgcgacgccatcactcaagataccgtgtggtgggccgatcagggcaaaggcaagaatgataataaaccgctgagtcaggaaacctggacccagttgaaagggctggttaccgaacaattatccggtaagcgtctgtttgtggttgatactttctgcggtgcgaacgctgatactcgtctgaaggttcgttttattaccgaggttgcgtggcaggcacacttcgtgaaaaacatgtttatccgccctactgatgaagaactggccaattttgagcctgattttatcgtgatgaacggcgctaaatgcacgaacccgaactggaaagagcagggtcttaactccgaaaactttgtggcattcaacctgaccgaacgcatgcagctgattggcggcacctggtacggcggcgagatgaagaaaggtatgttctcaatgatgaactacctgctaccgctgaaaggcattgcttccatgcactgttctgccaacgtgggcgagaaaggcgatgtagcgatcttcttcggcctgtctggcaccggcaaaaccaccctgtctaccgatcctaagcgtaaactcatcggcgatgatgaacacggctgggatgatgacggcgtgtttaactttgaaggcggctgctacgccaaaaccatcaaactttccgaggaagccgagccagatatttatcacgctattaagcgagacgctctgctggaaaacgtcatggtactggccgatggtaccgttgattttaacgatggatcgaaaacggaaaatacacgagtttcctatccgatttaccatatcgaaaacatcgttaagccagtatccaaagctggccacgcaaccaaagtcattttcctgaccgccgatgcgtttggtgttttaccaccggtatctcgtttaaccgctgatcaaacccagtatcacttcctgtctggctttaccgccaagctggccggtaccgaacgcggcgtaaccgaaccaacgccaaccttctctgcctgcttcggcgcggctttcctgtcgctgcatccaactcagtatgccgaagtactggtaaaacgcatgcaggcggcgggcgctcaggcctatctggttaacaccggctggaatggcacaggtaaacgtatttcgattaaagatacgcgtgggattattgatgccatcctgaatggcgatattgataaggctgagacattcaccttaccaatatttaatctgacggtaccgacggcgttgccgggcgtgaatccagagattctggacccgcgtcaaacctacggcagtcttgagcagtggcaggaaaaagcggaagatctggcaaaacgcttcgtcaccaacttcgataagtataccgatacccctgctggcgcagctttagtcagcgccgggccgaaaatctaatctgttttacttatgcaaaagggcacgatattcgtgcccttttttgatcttgctgattcttaatgatattagtcgctcacaccgtcaaccgtgtttgcccggtgccaccgatttcacgtctaagggcaatggcaggtaagcgcgaatgcacagcccgcccttctcactggtgccgatatccagcatacctgagtgagcatcaagaatacgctgtacgattgccagtcccagaccggtgccgctggtgctacgagcgctatcgccgcgaacgaatggctggaacagatgcttcaattcttccggtttgatacccggcccatcatcttccacttggaaccaggcgcgctgtaactcagtgccgctgcttacttttatccagccattaccataacgagctgcgttaaccaccatgttcgccaacgcacgtttaatcgataacggatgcacttcgaccttcacttcgccgtcgcataaatctgtttcaatttcccgctcatatccgctttctgccgcaatgacttcgcccaaaatggcgttcagatcgcaggtttccgtcggcatttcctccccggtgcgcaggtaatcaataaactgttcgatgatggcattacattcttcaatatctttattaatggattcagagagataaccatcctcttctgccatcatttccgtcgctaggcgaatacgggtcagcggtgtacgtaaatcatggctgacgcccgccatcagaagcgtgcggtcatctgccagcagctttactccggaggccatttggttaaatgcccgggttaccgagcgcacctcagatgcgccatattcccgcagcggcggcggaatatggcctttccccacctgtagcgccgcgtgctctagttccaccaagggccgattctgaatgcggataaacagccaggctccgccgaccgccagcagcataatcgctagcgtataacggaacagcggcgagaaatcaccctgatgaatttcagtcagaggaacccgcacccagatgtctggcgatagccaggttttcagccagacgaccggcgagtttttattaacctcaacccgcacatccgttggccctccaagctgctgggccatttgatcgctgagaaacttgtaatgctgagcccaacgcaggccactctcctccgccgcagcattggtatacaaagaaattcccaactcacggtagatttcacgccgaaaagcgggcgggacctccagtagcgtgccgtcttccagttgcagccggtcggtcatcagcatacgaacttcgtaagccagaaccttattgaactgctgcaaactaggcaaaatggcaaagtttagtaccactaaataagttgtgaccaaactgacgaacagcaaggtcacaatcaataacagggtacgggcaaacgagctacgcggagaaaagcgccatcgcctcatgctttactgccgtccggtacgaatacgtagcccaagccccaaacggtttggatataacgcggatgagcaggatcttcttccaccatacggcgtagacgggagatttgaacatcgatggaacgttccatggcgctgtactcacggccacgagccagattcatcaatttatcgcgggataacggctcacgcggatggctcaccaatgccttcagcacggcaaactcgccgctggtcaatggcataggttcatcttcgcgaaacatttcgcgggttcccaaattcagtttgaatttgccgaaggagataatcgcctcttcctgagaaggtgcacccggtagttcattggcctgacggcgcaacaccgcacgaatacgcgccaacagctcacgcgggttaaacggcttaggaatatagtcatctgcaccgatttccagaccaacaatacggtcaacttcttcgcctttcgcggtcaccataatgattggcattgggttgctctggctacgcaggcggcggcaaatagatagcccatcttcgcccggcaacatcaggtccagaaccatcaggtggaatgattcacgggttagcaagcggtccatctgttcagcattggctacgctgcggacttgaaaaccttgctcagtcaaatagcgttccaaaagcgcacgcaggcgcatgtcatcatcgacgaccagaatcttgtgattctcttgcattttagtactcccaaaggctgtattgcccgacctgaatattgttagaaaaactcacgctaacagacagctatttatggtatatattctagtcgaaattgttacaaagcttattgttctacctaataatcaacacttttcgtcaaatggccggtaccgaatctctaatatccagtaggttgcctcgccgttgggtgtctgaaccgtgatttcatcatctacctgtttaccaatcaaggctcgcgccaccggcgagtcaattgagatccattttttggccggatcgaattcatctgggccaaccaatcgaaaaaaccgctcttctcccagttcattttccaccctaacccaagcgccaaaataaacttttccttcctgacgcggatcgggatcgacgattttcaacacatccagacgtttggataaaaaacgcacccgacgatcgatttcccgcaggcgttttttcccataaatatattcggcattttcagaacggtcgcccattgcggctgcttctgaaactgcctgcgtcacccttggccgttcttctcgccatagatattttagttcgaggtccagagcctgccagccttcgcgggtgatgtaattacttttcgacattctcttatccactcaacacgggttgggtattcagtcatccaatataacgtaacttatcatcaatacgttgtcttccctcagattacgccaggttgtttactcgagccatgcctcaaactttacctatctcgacggtcataacttcacattaagacagactgtgttgactttttatacggcgagttataaagattaatacgcgcagaaaagcgctcaagtaacattgattaacatgatgttatatatggatttatttaaaatcacggaggattttaaaatggaaattattattcttgaaaccaagctaccagagcagaataaacctcgaccagcagccgaacaataacggtcaagacctccctaaaatattagggaggttagctcatactgacgtttataaaacaatttatgatctggagagcgaatcatggaaggtatcaacaagcctttattactgcccaatacggtagttttagacaagacggcctcgcgagcgggagtgacgctaactatcgcagacctcaatcaatgggataacttcaaacgcctgcttgaatgctgtgacggcacgcaaaccccacaacaaatcgctacacacctatcactcgacatcaccaccgttaatcatactttggcatctctggagtccgcaggcttcatctggtgtctgccagcgtatcaggcgattcctacgccactttttttgacggaattcaaccgctggctgcccatttgggtgcataagatgtatgaccaacagatatggcaagatttgtatgatggtaaagaatcgccgtcggtgcttatcggctgggcgcaggaaaatatgcattacactcgcagcgttatgtcgcatatgcctcgggctattcactatgccgatgaccaaatcgggcatggcatccaatttcgtcatctcagcgaagagtgggatcattaccggttatttatggccgcttgccacgatgtgggtatcgatcaggctcagttggatcaaagcccgcccctagccagtaccaccagcattacgcgttttatggccaatgtggctcaaatgggaacgctggtgtacaacgcctgcgaagccttgctggaagccaccacccaaaacgggcaatcggtgatcgatttctatcaaacggccggcgagcggctagaactccctcaggcattcaccgataagctgattcatcatttgatggcagatcagaagtttgaacatatcgatatcttcgaacacctactggaaggtcattcgacattaccggcacagaaagttactcagattttcactagctgtcatcggctcgccaattggtttgagatatggcatgacgatatttatcggcattatcactcattgccgctttctggcgctcagtgtgtttctacatcatccgaccagctttctggtacccactacgcaagttcaaccatataggaaagggttaactttatggataataccgcgacagccccagcactaccccttctgactcctaaggacttatcctttcccgctgacgcttggaacatgattcagcccgaagagatgaatgaacagtttatcgccgtgacgacttcgctgcgtggctggctgaaaggcggcgcaatgagcgaatactatggattaacgcctcactgctgcaaactcgccgttgaaatgtgccacctgctgtatggattagataaagcgctggtacgatgcgctgcggaaaccgaagataagcagcttcaggagctttttattctgcatgctttccacgctcatcgaatgaaaaaaacctgggataacatttgtcatgagctgacccaaaaacctctggctgaactggagccactgacctcaaccttaatgttgcagctcacactggagaatatcgccgctaaagatcctctggcttttgcctacgccatcgatctatttggatcacctggctacatcgaatctatcgaaccggtagtggcgttctttagcgagcttttggataacccggaaatcattgctcaccttgctacgtggaaatcagagtctattgataatgacacctctttcgccagtattcccctgaccaaagtctacggatatccccttgcgggcagctatggcaaagcctgttgcgattttatcggtccgcgcctgcaacgagatatcgataccagcctgattaatctggcggctctgggggatcaatttcatttgttttatcgcggtgtgcaggttttttacgtcgagaaggcattctccttccctcaattgcacatgaattggttacacagcgcctaatgccaccagcaccacaatcggtgaatactggagaaaatcatgctgttaaaagattccgttgtggttgaatatgttcgcgaacgagttttgcgcctcacctcccggctacaggtagttgagctggttcatgatgatatcaatgcattttttgtcgaaatgctgtcgagaaaccgagacccagaatccgctttgatagaaacagggtgcagcgccgatttcagccgagactttatggcattcctgcataaaaacgttctgctctatgccattccgattaatgctgattatattgctgccgcagatgccgctgacctgataaacaacgagctgaatcattgggcggatatactttacttcgacccattctggtcaacgatggaaaacccgacggcagcgacagatctgaatacgctttatgcttgggcaatagaaaactaccaccatactcacagtgtgatccgacatttaggagccgcgctatctcatactcagaatcaattggtcgcggacaaactcattacacatttgtctgaggaatgggatcacccttatctgttcaaacttagcgcaatacgttttcgccgtgctcatctgctacccgcactagaagaaacgctgttgccgttaccctgcactcagtctctttgcgcgctgttgcaattggccgccagacgaggttgtttcgcctacaaaagctgcgtagccgtactggaaaacaccgctcgacgagtcaatgaaacccgaacattttatcgaaatattgccgagcgaaacgcgttagattatagcgtggttgaacccttcgttatccacgcagaaacggatgaaaactatgatcatcttaattcgttaagtcagttttctgctcacagtccgcctttagccgtagcttgcgtggaagaagccttagggttggcttatcgttttgcagaggcactcaatctgtggcaacgccatatgatggatttgtacctcactcgctctttaggtgaaggccatcgaactcgacaaacagcctaggagtggctgggtatatgccgttgtggataaatactcggccgttactatcaatctctattatttttgccggatcgtcattggcctattacatgctgatgacgactctcgccacttatctctatgattatctgaacttatccgtagccaccgttggcaccatcatttttggctacgtttttacctcacgtctggcaaaggtcgctttggggccgtggttcgatcgattaactctacgcactagcctgatgctttctttaagcattgccgccgtcggttttttactggctgcatcagataagctgataggtatccttgctccttggtgcctctgtattgctggcgtgggcgtttcttccatcgtattgctaacccactctgctatcgcgcgccaaaaacagtcttcatccgacgcttctcacgctcctgccgattattcatttatctacgttcttatgcatggctcggcattaatcgcccctgccattggttttaatatattgctcaattatcctggtcagctgtattgggttattgctagtttctatctcgctctgctgctattttgccggttttttctctctgaacctcaccaccagtcagttgagaaagccaaaccgatcgttatagattttctgatcgccttcaaaaaacagcattactgccgattcttgctgatcaatagcctgctatggatgctttatgctcagcttttttccaccattccactctacgtgcgcgaagtattaggcgcagaaagccatatcacgcggttctacatggtcgaagccttgtctgtgatggtgctgcaatactgggtcagcgcccatattaacccgcggattcaggcttattttcccaaggtgacattagcggcgttttctctatccttcctgctgatttactacgctcataacatgtttttcatcctgctggcaggctgtatttttgcctttgcactaatggtatttatgccgtgctcaaacgcggctaatgcctcattcgccgagccagggcgtttcgctacctacttcgggctggtatcactgtctgccactctgggagattcgctcggcagtatattgggaatggtctgctttgatttgttactgcaaaacgagatgctaaaacactactttctctggctcgccggcattaccgcagcactggcaattctctgtcgcaatccgtataactgtcctttctgatttccctattcatctatcgaactgataccagacttatgaatgaaccactgagccgcattattgcaagcgaactacaggcccggccggagcaagtcatctccgctatccgcctgcttgatgaaggtaataccgtgccctttattgcacggtatcgtaaggaagttaccggcgggttggatgatacccagttgcgccagctggaaacccgtctgggttatctgcgtgaattggaagaccgccgccaaaccattctcaaatccattgaagatcaaggcaagctaactgagcaactcgccggtgccataaacggcactatgagtaaaaccgagctagaagacctttatctgccttataaaccgaagcgtcgcacgcgcggacagattgcgattgaagccggtctggaacctctggccgatagcttgtggaacaatccgcagcaagagcctgaatccgttgccgccgcctatatcgatgctgagaaaggcgttgccgataccaaagccgccttggatggcgcgcgttacatcctgatggagcgtttcgccgaagacgccacgctgctggctaaagtgcgtcagtatctatggaaaaatgcgcacctcgtctcaaaagtagttgaaggcaaagagcaggaaggggcaaagttccgcgattacttcgaacatcatgaacctatcgctcaggtaccttcgcaccgcgcattggctatgttccgtggccgcaatgaaggcgtgcttcaactgtctctgaatgccgatccgcagtttgaagaaccgccgcgtgaaagccagggcgaacagattattatcaatcatctggatctgcgcctgaataatgcgcctgccgatgcgtggcggaaagccgtcatcaactggacatggcgcatcaaagttttactgcatttggaaaccgaattgatgagcaccctgcgcgagcgggcggaagaagaagccatcaacgtgtttgcccgtaatatgcaggatttgctgatggcagcacctgccggcatgcgcgccaccatgggtctggatccaggattacgtaccggagtcaaagtcgccgtggttgatgccaccggtaaattagtggcttacgacacggtttaccctcataccggtcaggccaccaaagccgccgccactgtcgcggcgctatgcatcaagcatcaggttgaactggtggcaattggtaacggcaccgcgtctcgggaaacagagcgcttctttaccgaattgcagcagcaatatccggcggttaccgcacagaaagtgattgtcagtgaagccggagcctccgtgtattccgcatctgagctggcggcactggaattccccgatctggatgtctctatccgtggcgcggtgtcaattgcccgtcgcctgcaagatccgctggccgagctggttaagatcgatccaaaatctatcggggttggccagtatcagcatgacgttagccagagccaattggctaaaaaactggatgcggtggttgaagactgcgtaaacgccgttggcgtggatctcaatacagcgtcggtgccattactaacccgcgttgccggtctgacgcgcatgatggcgcaaaatatcgtgaactggcgtaatgaaaatggtcgtttccgtaatcgtgaacagctattgaaagtcagtcgtttggggccaaaagcctttgagcagtgcgccggtttcctgcgcatcaaccacggcgataacccgctggacgcctcgacggtgcatcccgaagcctatccggtagtcgaacgtattctggctgcgaccgagcaggcgttacaggatttaatgggcaatccaaccgtactgcggaacctgcaagccagagattttactaccgagcgtttcggtgtgccgacggtgacagatattcttaaagagttggaaaaaccgggtcgcgatccgcgtcctgagtttaaaaccgcaaccttcgcagacggcgttgaaaccatgaacgacctcaccgtgggaatgattctggaaggttcggtgactaacgtcaccaattttggagcctttgttgatatcggcgtccatcaggatggtttggtgcacatttcttcactggcagacaaatttgtcgatgacccacataaagtggtgaaagccggcgatatcgtcaaagtgaaagtaatggaagtagatttacagcgtaaacgtattgctttaacgatgcgtttagacgagcaaccgggagaaaccaatgcccgacgcggcagcgctgacaatagtgctaaacctcgtcagggaggacgcaatagtcaggattctcgcgatagagcgccagccaaaggacgcactgctagcgctaccggcgcaggcaacagcgccatgagcgacgcgctagcagcggccttaggcaaaaaacgctaatccaaccgcgccgctgactcttgtcagcggcgtttttccttcccagttcgcgccactctctcccttttctcactgctattctgtgatatgcctttcataatcttttggtctataaatatgaaattttatattcatagatgattagcagaagctaaacatctattttctgagtccatcatattttttctatttgtgttggacctctcaaaataaatgaggcgactgacgcaaccctaaggatttattaagaaacataataaataagattaactaaatataaatccagatattaattgattcaaatcatggtgaattgcagatagtgtaaattagaattattatccttaaggctggtcgtatatgtaaattgaaatacaattcattaaccattttaaccagccattctcgtttgcgaacgccacactttggtgctaaaaaaagaagatatcggcctagagcatattattcctaatgtcgtaacgaatatttaccattaggcttttgatcgctgttgaatacgataacgattctcactatcattattgtgtctattatcgcttagcgctaccgcccgcagttcaatggctagcgctaatagcccgattcctctggcagataatgtgatattcgcacctggcgttgagctggttagtccgccattttgttgccgataatgtcatcttttattatcacgagggttatatgcatcttcttcctcaacgcgcttataagattttgggattctctcctgaaatcagcccggcttatcgacaaaaattattgtcgctcggcatgttacccggttcatcatttaatgttgtgcgtctcgcaccattaggcgatcccattcagatagaaactcgccgcgttagcttggtcttgcgtaaaaaagatttagattttctgaatttggacctacagccttaatttttaggttcctttcattttattttctctgcggctcggttgggtatatcacctggtctagattaattttaatttactcatattacgttggatcatgaaagcactcacaatcggcttaattggcaaccccaatgcaggtaaaactacactgttcaaccaactgaccggagcacgtcagcgcgtaggtaactggtctggggtcacggtagaacggaaagaaggtcatttttccacggcgcagcatcaggtgactttggttgacctgcccggcacctattccctgacgaccatctctgaacaaacctcgctggatgaacaaattgcctgtcactacattctcagtggcgaagccgatctgttaatcaacgtaatagatgcgtcgaatctggaacgcaacctctatctgacattgcagctgctagagttgggcattccatgcattatcgcgctgaatatgctggatattgcccaaagtcaacgaatcaaaattgacgtggatgcgttgtctaagcgccttggttgcccggtcattccactagtttcgactcgtgcaacaggtattgccgaactgaaaaccagcatcgaccaatatcagccgaacaccgataacgctctggtgaactatccgccgctgttgctggaagaagttgaaaaactgacttcggccatgcccgatagtctgccaatgcagcaacggcgctggctggcgttacaaatgctggaaggtgatatctacagtctggcacgctccggcgtttcgcccgctttgctggcagagtcccgccaacggcttaaagatcaacaacatgaagatcccgaactggtgattgccgacgctcgttaccaaagcatcgcaacgctgtgtgatgcggttagcaacgcgcaacaggctgaacctaaccgtctgactcaaatgctagataaagtgattctgaatcgttggctcggcgtgccaattttcctgtttgttatgtatttgatgtttgtattggcgatcaatatcggcggggcgctacagccaatttttgatatcggctcatcggcgatatttattcagggtctacaatgggttggctataccctgcacttccccgaatggctgacgatatttttagctcaggggattggcggcgggatcaacactgttttaccgctggtaccgcaaatcggcatgatgtacctgtttctatccttcctcgaagattctggctatatggctcgggcggctttcgttatggaccgcctgatgcaggctctggggctgccgggtaaatccttcgtgccgctcatcgtcgggtttggctgtaacgtgccggcaattatgggcgcacgtaccttggacgctcagcgcgaacgcctgataaccgtcatgatggcgccctttatgtcctgtggtgcacgtctggctatttttgccgtcttcgccgccgctttcttcgggcaggacggtgccagcatcgtattctccctgtatttgctcggcatcgtggtcgccattcttaccggactgctactcaagtacaccattatgcgcggcgaagcctctcccttcgtgatggaactgccggtttaccacgttcctcacttaaaaagcctgctgctacagacctggcagcgcctgaaaggctttgtgctgcgcgccggtaaagtcatcgttatcgccagtatttttattggtggattgaacagctttaccttcggcgggaaagccgccgatagcattaatgactcagctttggcctcggtcagtaaagtactcacgccgttgctgacgccaatgggcgtacacgccgataactggcaggccaccgtgggcttggttaccggggctatggcgaaagaagtcgttgtggggacattaaacactctgtataccgccgagcaaattaagaacgaaccttttgatgcagaaggctttaatttgctggatgaactcggcggagcggtaaacgaaacctggcagggattaaaagataccttcagcctgagcgtactttccaacccgatcgaagccagcaagggtgacggtgaaatggaagctggttcaatgggcatgatgagcagcaaatttggctccagcgtggcggcttatagctacctgatctttgttttgctctacgttccctgcgtttccgttatgggcgcgatcgcccgtgaaaccagccgcggctggatgaccttctcaattctgtggggactaaacgtggcttactcactggcaacgctgttctatcaggccgcgacctttagcagccatccacagcaaagtttgggcattatcgcggcggtcatcgtctttaacattttgatattcttcggcctgcgccgtgctcgcagccgggtaaccttccgcctacagaatcgacagcccgcgagtggctgccaaaatggcggcggtcactgtcattaatcagggagaaatcaattatggccagtttgatgcaactgcgtgacacccttgccctgaacggctgcatggaagctagccagctaagtcagcagttggccgcaccgctacctttggtagaagctatgctagaacgactgattgctatgggaaaactggagcgtatcgagcaggataacaccggatgcctgagcggtagctgtaaaagctgcccggaaggccagaaatgcaataccgtggtgtatcagttaaaaacccactaaagaaaaaggtgatgtcagcaatggcatcaccttattgttattcaacgataattacttataaacatctgcggtagcgttaaattttttcttttcattttccgagatgatgacgtagtacttgccgcctttttcgtcggctttagccgacaaatcctgtttcacatccagtggagacatggcttcgccagaagaagaaatggtgccaattttttcgtagcctttgtctttcgcttcttgtcttgtaatttctttcgctgccaaagcgccaaaagacaacccaccaacaaccagagcaaccgctacatttttcaataatttcatggtaatacctcgcattaaagtgataggtgcgtgtacagaaaaattgagccaagtaataacgatatgagttagatttgatttgtattgatgcgcctacaggaaaggttcatccccagaggaagggttacagaaaaatcggcgcgatgaactgcccgttctgtagcacctgatctaacgcttctaattattgagtagattcagtatttagccaataaatgaccaatatatttcgatcccgtcgaggtaatggcagagatagcccttctcccgacggcgtgactccattaagaactctgagcagtctcagcggcaaaattaatgattaactctgcaaaatcatcagggtgagagataaatggagcatgagccgagcctttcatcactacagagcgactttgaggtaaagcatcatccagcaacgcggcaactttgcgcggcaccagaccatccagataaccataaatacgcagtaacgggacagaacaagcagccagctcctgacgtaaatccaccgtgcgcaaaatttccaggccaccggtcaatacttccacctcaggcatttgatgattcaataccaccgatttcagcaagcgtgcatcctgacgggcgctttccgtccccagcgtttgtaacgccaaaaaacgctcaacggtgcgttgaaaatcttccgttagctgctgttggaaacccgccagcacttctgggcgaatccccggccattcgtcatgggcggtaaaacagggggaagaagagaccgtaatcaggccgctcacgcgctccgggtgactcagggcaatctgactcgccaccaacccgcccattgaccaccccagccacagcgccttcgctggagcctgtttctgtacaatatcagccatctcatccagcgacatcgcaccataatctcggctgcgtccgtagcccggcaaatcgaccagatgaatacgaaaatgcggggcaagccgctcaatcatgcaacgccacacctcggcgttcagtccccatccgtgcagcagcacaagatcgcgatcgccttcgccgcaggtctgccaataaagctttgtcatcagttattatcctgttgccttcaacatcaaggaagatgcctatgctaacaatcaccgggctatgttggctatgccgacaaccgttacatctggcttttcacggaatttgctgtttctgtttacgtcatttacccatgccgccaccctgctgttttcgctgtggcttgccctcatcacagcccgaactaccctgcggtcgctgcctacagcaaccacggccatggcagcggatactgttcatcggggattatcaaccgccgttaagtacgctaataaaaatgctgaaatttaagggtttttcacaattagcgccggttttggctcgcttgatattcttacgctggcgaacgataaaatacgccgatagtgcggcaatcaagcctcagcggttgatcagcgtgccgttacatcaccagcgctgctggcagagaggttttaatcaaagcgatttattggcgcgacctttggctcgctggctaggctgcgattatcatcctgacagtctaaaacgcctgtctgccgcgccaccgcagcggcagctcaccgccagcgcgcgccggaagaatctaaggggaatatttcgccttaccgaagatttttgcggtcagcacgtcgtattactggatgatgttgtgacaacgggcagcacggttgccgagataggcgctatgctgcgggaacagaaggtaagctcattgcaggtctggtgtatttgccgcaccttgtagtcacggcgtcaatgggcgtattataaccgacaagagcagtcaactattgagctaatgccatgatcaaaataacagatgcagcacaatctcattttgccaaattgctggcaaatcaagaagaaggtacccaaatccgcgtatttgtgatcaacccaggtactccaacggcggaatgtggtgtgtcctattgcccgccggatgcggttgaggccacagataccgagctaaaattcgagcaattatccgcctatgtggatgaattgagcgtaccttatctgcaggatgctgaaatcgacttcgttaccgatcagttaggctcgcagttaaccctgaaagcgcctaatgccaaaatgcggaaagtggatgattctgcaccgctgatggaacgggtagagtacgttttgcagtcgcagattaacccacagctggctggccacggtggtcgcgttacgctgatggaaatcaccgatgacgggctggcaattcttcagttcggtggcggttgtaacggatgttcgatggtcgatgtgaccctgaaagaaggcatcgaaaaagagctgttacagaaattccctgaattgaaaggggtaagagacctgaccgagcatcagcgcggcgagcattcttattactgattccgttgtcttaaactggcaatggcaactctcactgccgttgcctaattgagaaacgctggaaaataaagggggtcgactcatcatcggctcccctttttaatttctacccttcaacgaatggcatcggataaacgctgatggttaacccgcagagacattcttgcgccgcttatccaaatccttcaaaagacggttaacccgctgatcggcaaacatctcctctaaagaatgggtcagcttacgacgccagttcggatactcatcgctggtgccgggaatattgaccggcgctgccatatctaaccagtcttccggctgtaatcccaacaacgcgctggcgctatctgccacatagcgttgtagacctctatttaacgttggactcatcgctagcagcgccgccttgcggccgactttcttcggtacgcagccataatggtgcaaaccttccagcaggccttgcttggctctttcccgatccgcatacaactgtttgagaatctgctggtctgggtacaaacccagcttattgcccaaagtcagatcgtcactttgccagtagccacgcagcgtcggtaaatcatgagtagtaatagtcgccatcgcctgcaccggataagactgaggcgcacggaaagtgttttcgctatctctttcaaagtagagcactttgtaagaataaacaccgctatcccgcagcttgctgactatttccaccggcaccgtccccaaatcctctccgatcaccatgcagcgatgacgctggctttccagcgccagtactgccaaaagatcgtcaaccggatacttcacataagcgccctgatctgccgtttcaccataaggaatccaccacaggcgcagcagtgccataacatggtcaatccgcaatgcgccacagctggtcatattggcacgcagcaaatcaataaatggctgataggctctggctaccatcacgtgaggatccatcggcggcaacccccagttttgacctaaagggccaagaatatctggcggcgcgccaaccgaggctttcaggcaatagagttcgcgatcgcaccaggtttccgcgccgccttcggctacgccaaccgccaaatcccgatacaaacctatcggcattttttgctgctggctgtggcggaaacactgggaaaactggctggctgccaaccactgcaaccacaggtagaaagtcacctcatcactatgctgctggcaaaactccgccacaccttcgccctgtccatcgcggtattgttctggccacaccggccagccccacatagcagaatcctgttggcttaaatgagcatgtaaagcatcgaaagcggcctgttgctgcaaacttttaccgccctgctccacaaactgccggaagtcctgcatttgcttatcattggctgctcgcgccaaaaacagcgggaaagccagacgtaaaccggccagtttcagctctgtcactttggcgtaatcgacccattcggcggtgcggatcgcagccagcgtgctttgggtttgcggcagatgccaccagcgctgagctgcttcactctgctgaaattcctccacgttgttcacgtcgatataaaccacattcagccagcgacgggacgaagggctatatgggctggcgctattgggattggccggatacaacgcatgaatcggatttaagccgataaatgcaccgccacgccctccgacctgttcaaccattcggtctaaatcgccgaaatcaccgataccccaattacgctccgaacgtaaagtgtagagctgtacgcaggcgccccagagcttttttccggtcagcaacgcgtctggctcatagcaacgtttcggtgccacaatgattgaacattgccattgctgcgtaccttgctccaacgctagatgatggtaaccaaggggtaacgatgccggcaacgtcagggttttttgggcgctaacgcgcccttgatgtgaaataccctcttctgtcaccagttgccagtgataatcaccttcaccgccgatagccagagtcatcgggcttacgtgagtaaagactttcaccaccggtaacggcgttttctcacccagcgaaggctgaacggaatccgggcttcgtcccatggctaccagcagtttctgcttggtttccatcggtatagcctgctgtttaccgtgggcattaatgtagctggcggctatccctgccagcgtagctgcctgatcgagcgatttacgatccatgcagtctccttaacgtttggcttgccagattcgctgctgataatcgcgaatcgaacgatcggaactaaacattcctacccgcgcggtattaagaatggtgcgacgagtccattcctctttatcacgatacagtgcatcaatctgctgttgagcctcacaatatgaagcaaaatcagccagtaccagatatggatcgcccccttcacgcaggctatgcagcatcatatcgaaagcgtgtttatcaccgttgctgaaggcaccgctggccagttcgtccaaaatactcttcagatgcgcatcggctttcaagactttcagtggctggtagcctttcgccaaaatagctttaacctgctcgacggtgttaccaaagataaagatattctcatcaccgacctgctcggcaatttcaacgttagcgccgtccagcgtgcccacagttaaagcgccgttcaatgccaacttcatgttaccggtgcccgatgcctctttaccggcagtggaaatctgttcagaaacatctgccgccggaatcatcagctcggctacggagactttataatcaggaataaatacaactttcagacgatctttgacgatcggatcgttattgatcttctcggccgcctgattaatggcgtaaatgatatttttcgccaggtaatagcccggtgccgcttttgcaccaaacaggaagacccgcggggcaatatccagattaggattatcgcgaatctggcgatacagcgacagaatatgcagtaaattcaaatgctgccgcttgtactcgtgcaggcgcttaatctgcacgtcaaagatggcatctggattcagcgtaattcccatagtgcgatggacgtattcggcaagttttaccttgttgtcgtacttaatctgctgatagcgcgcacggaattttttatcctcggcgtagggctccagcccttccagcacatccagattgttcgcccattccacttttaaagtttcgtcgatcaacgaagaaagggccggattacactgttttagccagcggcgcggcgtaataccgttggttacgttatggaatttttctggccacagctggaagtattccgggaacaaatctttaaccaccaaatccgaatgtagttgcgccacgccgttcaccgcgaaaccgctgaccacacacaggtttgccatacgtacctgtttatcatgatgtacggccagttttgcccacaccgctttatccccaggccactgtttatccacccgttttttaaactgagcgttgatttgcttgatgatggcaaagtggcgcggcaacaggctacgcaccaatttttcatcccaacattcaagggcttccggcatcagtgtatggttggtataagcgaaggttttactggtaatagcccaggcagcatcccagctcaactgatgttcatccaacagcactcgcagcatttcaggaatagcgatggttgggtgggtatcattcagctgaatcacttcatattcaggcagatcggccagtgtacgtccggcggcgtgatgtttgcgtaaaatatctgccacggaacaggcgcactggaagtattgctgcatcagacgcagacgctttccggccagatgattatcgttgggatacagaaccttagtcagtttttccgcatcaataccgttttgttcggctagcaggaatttaccgtcgttaaacttagtcagatcaaacggatgaacgtgggttgcctgccataaacgcaggggctgagtcaccccattgcggaagcccaataccggtaaatcccaggcttcaccgcgcagcgtaaaatctggacgccaaagctgacgaccatcggcctgtttttccagcttgccaccgaaactcacgtccaccgccagcgccgcattatgacggaaccacgggtagctctcgcgctcccagttgtctggcgcttcctgctgctttccttcgctaaatgactgacggaacagcccatattgatagttcagcccatagcccgtcgccggttgctccaccgttgccatcgaatcgaggaaacaggccgccaaacgtcccagaccaccgttacccaaagccggatcggtttcctgctccagcaagtcggccagattgacctgctgctctgccagcagtttctcaacggtttcataccagccgaggttgataagattatttgccgtcaagcgaccaatcaggaattccattgagatgtaattcacatggcgctgcgttttttgcactttagtcggcgccggttgagccgccaactgttcggccaatgccgcgctgaccgcctgccaccattggtgctgggtcatctgctgggccgaactgaggccaaagcgctgccactgacgggtcagtgctgccagaaaatcatccttctttagcatgggctgtgacatagggaagtctctatcctgtgagtggggtaattttacccttatcctgccgaggagaatcggcaagagcatcatcctggtaagggattagctggggatgagtcgcagggcgtagctaaaaatgtgatcaggtgcaacttacgaccataggaagtattaacgttattgcaataatttggccgttatcagaccttaacagggctgattaattacgaggcttaaaataattatccctatgaatccgccggtctgtcgttgccatttgagtctggaataatatgctgatcccttcaaaactgagccgcccggtacggctgcaaaataccgttgtgcgcgatcgcctattggccaaactttctgcggcagcgaactatcgcctgacgctggtgaattgcccggcggggtacggtaaaaccacgctggttgcccaatgggcagcggggcaatccaacctcggctggtattcactggatgaaagcgacaatcaacctgaacgtttcgctacctatctggtcgcggcggtgcaacaggccaccggtggacattgcagcaagagcgaagcgctcagccaaaaacatcaatatgccaatctttcggcgctgttcgcccaattatttgtggaactgtccgactgggacgggccgctgtatctggtgattgatgactatcatctgatcaccaacgacgccattcatgaagccatgcgctttttcctgcgccatcagcctgaaaacctcacgctgctgattttgtcccgcacgctgccgcctttgggcatcgccaatctgcgggtgcgcgatcagttactggaattgggtattcaacagttggcgtttaatcatcaggaagcgcagcaattctttgattgccgcttgccagtaccattagatcaaggagatagcagccgcctgtgtgacgaagtggaaggttgggctacggctttgcagcttatcgccctttcctctcgtcaacccaattcatcggcgcaaaaatccgctaaacgtctggctgggttaaatgccagccatctatccgattatctggtagatgaagtattggatcaggttgatgctaatgctcgtgcatttttgctacgttgttcggtgctgcgttcaatgaacgatgcgctgattgtgcgtctgaccggcgaagacaacggccagcaacggctggaagaattggaacgacaggggctattcattcaccgaatggatgacactggcgaatggttctgtttccatccgctgtttgccactttcctgcgtcaacgctgccagtgggaactggcgttggagctaccggatcttcaccacgccgcggctgaaggttggatggcgctgggttatcccgctgaagctattcaccatgcgctagcggctggcgatgtggggatgctgcgggatattctgctgcaacacgcctggtcacttttcaatcacagcgaattggcgctgctagaacaatgccttagcgcactaccttattctttgctgatacaaaatcctgaactggcgctgctacaagcctggctggcgcaaagtcagcatcgctatagtgaagttaacactctgctcggtcaggccgaaacggcgatgctggaacgtaaaattccgattgatgctgcgctcagcgccgaatttgacgcactgcgagcgcaggtagccattaacgcaggcaagccagatgaagcggaaaaactggcaaccgatgcgctgaaatacctgccgatggccagttactacagccgaattgtggcaacctccgtcacaggtgaagtgcatcactgcaaaggtgaactggctcgcgcgctgccaatgatgcagcaaactgagcaaatggcgcgccgccaccaggcctatcactacgcgttgtgggctctactgcaacagagtgaaattctgattgcccaaggcttcttgcaggcagcgtttgaaactcaggaaaaagccttcgagctgatacgcgaacagcaccttgagcaattgccgatgcatgaattcttactgcgtattcgcgcgcaggtgctgtggtcgtggtcgcgactggatgaagcagaggaagccgcacgtcagggcatcgctattctcgccaactatcagccacagcagcagttgcaatgtctggcaatgctctccaaatgctcgctggcgcggggcgatttagataacgcccatatgtatattcaacgctgcgaagccttgatccacggcactcaataccatcgcgactgggtaaccaatgcggataagcccagagtgatttactggcaaatgaccggtgataaaacggctgcggctaactggctgcgtcaggcggaaaaaccgggcatggccgataaccatttcctgcaaggccagtggcgtaatattgccagagtgcagattatgctcggttatttcgatgaggccgaagtggtactcgatgaactcaacgaaaatgcccgtcgcctgcgcctgaccagcgacctcaaccgcaacctgctgttaagtaatattctttactggcaaaccgaacggaaaggcgaagcgcaaaaagcgctgatagaatctctgacattggcaaaccgcaccggttttatcagccactttgtgatcgaaggggaagcaatggcacagcagttacgtcagcttatccaactgaacgcgctgccggaactggaacaacatcgtgctcaacgcatcctgaaagacatcaaccagcatcatcgccataaatttgctcattttgacgaacgctttgtcgataagttactgacccatccgcaggtgccagaattgattcgtaccagcccgctgactcagcgggaatggcaggttctcgggttgatttactccggttacagtaatgagcaaatagccagtgaactggacgtcgccgccaccacaatcaaaacccatattcgtaatttgtatcaaaaattgggcgtggcgcaccgtcaggaagcggtgcaacaagcgcagcgattgctgcaaatgatgggatacggcgtttaaccgaccgctgattttatctggcggacatttatccataccaaccaatgggtctttattggcataaaattgattacaatagcggcataaccacattaatcgccaataaaagggtgtcagcagtatggaacaatttgaagcaatcgacgttgagcaagcctacactcgctggaaagagggtcaggcggttctggtggatattcgcgatccgcagagctacgaagccggccatgcgccgggcgcatttcatttgaccaacggcagtttgcagacttttatgcaacaaaccgattttgaccagccggtgatggtgatgtgctatcacggcaacagcagccgcggtgcctctcaatacctgctggagcaaggtttcgatgctgtttacagcattaacggcggtttcgaagcctgggccagaaattacccgcaagatgtcgctacagacaaagcctgatttaccccttttcccaatgcaagaggccgccgctggcctctgccttgcgccatattgcatcacccacaagaatgatattaagccgacatattcacctgtctcggcggttttcgttgttgtgaactctggctttttttaaacaacagatgacatccctacagcgaaaagggagaatcagtttgctaacatgctaaattgctacgataaagctttagatattttataaatcataacgttagacggtaaattataaatatgattcgtgtgatagtaatttctaacctacgtctggcgcaggcctttgtggactatatggccacgcaaaaggtgattttggaactccgacaccagagccaggatgcagaaatctggctaaatgaggatgaaaaactgcctcaggttcagcatgagctggaacaatttttattagacccactcaacccgcgctatcaggcggcgagctggcaatcgggcaatcttcacaccgatatgccttatcagcgtgtttcgctgttgcagaatttacgtagtcaggctggcccactcaccctcggtctgatggcggtatgtattgcagtctatattctgatgcaaatcgttggcgataatgcggttatgagctggctggcctggccggtaaacagcagccagtatctggaaatctggcgttgggtcagccacgctgttctacacttctcgctgatgcatatcctgtttaacctactgtggtggtggtatttgggcggccaaatggaaaaacgcctcggcacgggaaaactagtggtattaacccttgtttctgccgtatttagcggctggggacaatccttattcagcggctcaaattttggtggcttgtccggcgtggtctacgccctgatgggttacgtttggctgaccggccaacgggcgccggagcggggagtctctctccctaacgggttgatggctttttctgttctgtggttaatcgccggatatttcgatattttaggtctgtcgatcgccaatgccgctcacgtttctggtctggtcattggattactgatggcattttgggatacgcgtaatagcacccgaaccacacaataacggtccgtaaaccgggcaaattaggggattatcgtgaagcaaacgcagcgacatgatgcgattattgaactggtgcgccttcagggttatgtcagcactgaagaactggtagaacactttgctgttagtccgcaaaccattcggcgtgacctgaatgatttggccgatcaaaataaaattcatcgccatcacggcggcgcagcgctgccttccagttcggtcaacgcggcctataacgaccgaaaagtcatgtggtctgaggaaaaagcgcgtattgctcaacgagttgccagccagattcccgatggcgcaacgctgtttatcgatatcggcaccacgccagaagccgtggctcacgcgctgctcaatcataaaaatcttcgcgtcgtgaccaataatctaaacgttgcgaccttactcaccgctaaagaagatttccgcctgattctggccggtggcgaagtgcgaacccgtgacggcggcattattggcgaggccacgctggatttcatctcccagttccgtctggattacggcattttaggcatcagcggtatcgatatggacggctctttgcttgagttcgattatcacgaagtacgcaccaaacgcgcgattatcgaaaactcccgctgcgtgatgttggtcaccgaccactccaaatttggccgtaatgcgatggtaaatctgggaaatatgaatttaatcgactacctgtttaccgatcagcagccccctgccagcgtgatgaaaatcattgagcagcatgatgtgcagctagaactgtgttaattcccgccctctggctcacccaataagacttgaactacaatcaggggcttcggcccctattgacgatatttacccacactttcgccgctattccctgccatttctctcaagttagacacccaagacttcacctataatctatctataagacggtaaaaacgcttcccgcaaaggaagtttgcttcgctgcactgattacatctttaaaatgaacccgcaacaaaactgttaccttcatcacgcataaatgtttttctttggttaactcttggcttgtttgttggtttttgattacaatcgtgagcgaaaacgaacattaaagagctgtttcgaacatctggaggaaggttacatggaaaccaaagacttgatcgtgatcggtggcggcattaacggtgccggtatcgctgcggatgctgccggacgtggcctgtcagtactgctgctggaagcgcaagacttggcctgtgctacgtcttccgccagttccaaacttatccacggtggcctgcgctacctggaacactacgaattccgtctggttagcgaagctttggccgagcgcgaagtgctgctaaaaatggcaccgcatatcgccttcccaatgcgttttcgcctgccacatcagccccatctgcgccctgcctggatgattcgcgccggtctgttcctgtacgatcacttgggtaaacgtaccactttgcctgccagtaaaggcctgcgttttggcgcagattccgtcctaaaaccggagctggtgcgcggtttcgaatattccgactgttgggtggatgatgcgcgtctagtggtgcttaacgctcaggaagtggttgaacgcggtggcgaagtgcgtactcgcactaaagtgacccgcgcctggcgtgaaaacggcctgtggatggtagaagcaaccgacgtcaatactggtaaaaccttcacctggcgtgccaaaggtctggttaacgccacaggtccttgggtaaaacagttctttgacgatggtctaaaactgaaatctccttacggtatccgcctgattaaaggcagccatatcgttgttccacgcgtacataaccagccgcaggcttacattctgcaaaatgaagatcaccgtatcgttttcgtcattccgtggctggatgattactccattattggtaccaccgacgtggaataccacggcgatcctaaagatgtgaagatcgacgatcaggaaatcgattatttactgaaagtgtataacgaccactttaagaaacagcttggccgtgacgatattgtctggacatactctggcgtgcgtccgctatgtgacgatgaatccgactcaccgcaggccgtgacccgcgattacacgctggacgtggctgatgaacagggcaaagccccgttgctatcggtattcggcggcaaactgaccacttatcgtaaattggcagaacatgcactggaaaaactgactcaatactacccgaaagtcggcccagcctggactaagaacggttcgctgccgggtggcgatatcggcggcgatcgcgacagttataccgttaaactgcgccatcactataactggctgccggaagctctggcgcgccgttatacccgcacttacggtagccatagcgagattattctggccaatgccaccagccttaaagatttgggcgaagatttcggccatggcctgtacgaagccgagttgcgctatttggttgagaaagagtgggttgtcgagttagacgatgccatctggcgccgtaccaaactgggtatgtggctggatgaggcgcagaaacaacgcattgccgaatggttggcggcagttcatgccgagaaaatgaatacgctgtcactggtttcctgattcgacagacgcgccgcaatgaaaaaaaccgcctgcttcctgatagaagcggcggttttttcttagagttttatcggtttaatgtgccaaatctcatcggcatattcctgaatcgtcctgtcagatgagaaataccccatattggcgatatttaataccgcacgacgagtccattcatccggttgtagatatagctcatccaccgcgtcctgcgtatccacatagctacgatagtcagccaataactgataataatcgcccagattaaccaacgaatcgaacaggctggtatagcgattgggttcttctgggctgaaaattccggtggcgatctgcgtcaacacttgatgaagctcagggtcttcatcatagtatttccgcgggttataaccactgcggcgtaattcttcaacctgctcagcggtgttaccaaatatgaaaatattatcctcaccgacgtgctctcggatttccacgttagcgccatcgagggtgccaatcgtcagcgcaccgttcagggcaaatttcatattactggtgccagaggcttcggttccggctagtgaaatctgctcggatagatccgccgccgggataatcatctgcgccagactaacgccatagttcggaataaacacgactttcaacaggttgttcaccctaggatcgttgtttattactttagcgacatcattgatcaagcgaataatctgtttcgcattgtaataggccgatgccgctttaccggcgaagatcaccactcttggtacccatttcgcctctggatcctgcaaaatacggttatagcgcgtgatcacatgtaaaacattcagcaactgccgtttgtattcatgcattcgctttatctgcacatcaaacagtgccgcgggattgagcacaatattcaggttttgtgcgacataaattgccagccgctttttattttccagcttggctttctgtatcgcctgtaaaaagctcggataatcaatattgggtttgatatcgctcagttggctaagatcggtacgccagttatggccaatgctgtcatccagcaccgccgccagcgggcgattcgccagcccaagccagcgacgcggcgtcactccgttggttttattgcagaagcgagtcgggaaaatacgagcaaaatcagcaaatagagactgaaccatcaactcagaatgcaacgccgatacgccgttcactttatggcaggcaatcacggccagccacgccatgcgcacccgccgcccgttcccttcatcgataatcgacactctggacggtaattcattatcgtccgggaaggcttcctgcacttgtttgaggaagtgatcgttaatatcgaaaataatttgtagatggcgcggcaaaatcttaccaatcatatcgatcggccaggtttccagtgcctcagccatcaaagtatggttggtgtaagagaaaatggtttccaccattccccaagctttgatccaggtaaatttatgctcatcaatcagcaaacgcattaattcagggatagacaacaccgggtgcgtatcattcagatgaatggcaatcttctctgccagattgtcgaaggtatgatgcagcgcccagtggcgggctaaaatatcctgaaccgtggctgaaaccaggaaatactcctgccgtagacgaagttctcgtccggaataggtcgaatcatcgggatacagcactcgcgatacgttttccgaatggttcttatcctctaccgccgcaaagtaatccccctgattgaatttacccaaattgatttcattactggcgcgcgccgaccataaacgcaatgtattagtcgcatcggtatcaaaaccaggaatgatttgatcataggcgcaggccagaatttcctcagtttccagccagcgggtttttgtcccttcctgctggatacgaccaccaaagcgcactttataacgtgtgttatgacgcgggaattcccaggcattaccgtattccagccagttatctggggattccgcctgctgcccattgacgattttctggctaaacatgccgtattcgtagcgaatgccgtagccccgccccggcatggctaaagtcgccagtgaatccagaaaacacgctgccagacgccctaaaccgccgttccctagccctgggtcactctcttcggccagcaactcattgaaatcgatacccatttcatccagcgcggctttgatatcatcataaatacccatagataacagcgcgttggacaatgttcgacctaacagaaactccatcgacaggtaataaacctgccggacatcttgagataattgtgcccgattggagcgcagccagcgttccaccatacggtcacgcactgcgaacagcgtggcgttcagccaatcgtgctcagtggcgatggaaggatctttaccgacaataaacatcagcttataggcaatagagtgtttcagtgcttccacactgactacgggtgaggtgtagctaaagggtgtcgtcattagcggtatttccctaatttgtggttacaacaagtgttgataaagcgaccggtagtctgctgccgctacctgccaaccaaaatcaagctccatcccatgacgctgtacgtgacgccaatgttttggacgaacccagagcacaaaggcacggcgaattgcccgctccagttccgctgcttcacattcatcaaacacaaaccccgatgcgctaccatcggccagattttctaaagcacaatccactactgtatccgccagcccgccggtatggcgcactaacggcagagttccgtatttcaaaccgtataactgcgtcaagccgcaaggctcaaaacggctgggaaccaagatcacatcggcaccggcaataatccggtgcgagaacgcctcatgataaccaatctgaacgccaacctgatctggataatccgccgatgcggccagaaaagcctcttgtagcagcgcatcccccgcgcctagcaccactaactggccacccagcctgagtaactcgggtaacgcctgtagcaccagatccaaacctttttgcgccgttaagcggctaaccaccgcgaaaatcggttttttatcagtaacctgtagccccatggctttctgcaaatgggctttgttgaccgccttgcctcgcaaatcttcagaatcatagcgctctcccaacagagcatctgtggtcggatcccaaatttcttcatccacaccgttgagaatgccgctcaatcgcccttcccgcgctcgctgttgcagcaatccctccattccgtaaccaaaggcaggctgggtaatctctttagcgtaggtcgggctaacggttgtcacatgatcggcgtaaaacaaaccggctttaaggaatgaaatctgaccgtagaattccaaaccgtagatattaaagaaggacggcggaagctgtagctcagccatatggtgagcggaaaatagcccttggtaggccagattatgtaccgtaaagaccgaacgagccggacgtccccgcgccgccagataggcgcaggccaaacccgcgtgccaatcgtgagcatgcacaatattggggcgccagtagctatccagcccgcaggccagttcgcaagccatccaaccaagtagcgcgaagcgccgatgattatcaccgtaagcattcaaccattggtcgtggtaagggctgccggggcgatcgtataaacctggcacatcaatcaggtagattccaacgccattgtaagtgccataactcaattccacccgcccggcgaaggtatcaatttctttgactaatactctatggggaatgccgtttttcaggtcgggaaacgccggtaaaatcacccgaacgtcggtgccatcggcaatttgagccgcaggtaaagcgccgacaacgtccgctaatcctccggtctttagtaagggaaacatctcagaacagacatgtaaaacccgcatcattactcctggtatctcatcagctaccaataggcttacagacaacatacggcttcggccagaatatcaggctcacgttttcacgccagcctgaagctaaattacaactgagccagcatttcccttgtgacgagtacaattccgccttccgaacggtagaaacgtgcactatcctcttccgcattctcaccgatcaccatcccttctggaatttggcaggcgcggtcgataatgcagtgccgtaaacgacacgatcggcccacattaacgtctggcagcagcaccgctgaatctatcgtacagaacgagttaatccgcacccgagggaatagcactgaatgcaccaccacggaaccggaaacaatacagccgccagaaaccagtgaattcatggtcataccgtggctaccggagcgatcctgcacaaattttgccggcggcagtggttccatatgcgtgcgaatcggccaggagcggtcgtacatatccagttccggcgttaccgaggctaaatccaggttagcgcgccaataggcatccagtgtcccgacatcacgccaataaggcggtaagtcgccgttggaagtcacgcaagacagagtaaacggatgcgcccaggcttctccccgctcggtaattttaggtatcaggtctttaccaaaatcatggctggaccccagagtattcatatcctcgagcaataatttatacagataatccgcattaaaaatatagatccccatgctggccagcgccatatcgggatttccaggcattgatgccggaacttccggcttttctgtaaacgacttgatctgatagtccagagacacttccataacaccgaatcccgaagcttcgcttagcggcaccggaatacaagccacgctacatttcgcccctttttcaacgtggtcaatcagcatgcgcgagtaatccattttataaatgtgatcacccgccagaatgacgatatattccgcattgtatctgtgaataatatccagattctgatacaccgcatccgcggttcccttgtaccattcttcagtgctcaaacgttgctgagccggcagcaaatcgacaaactcgttcatttcttcgttgaagaacgaccaaccgcgctggatatgctgaaccaaagaatgggactgatattgggtaatgacgccgatccggcgaatgcccgagtttagacagttagacagggcaaaatcgataatgcgaaacttaccgccaaaatgtaccgccggtttggcacgagtggccgtcaggtctttcaagcgcgaaccgcgccctcccgctaaaatcagagctaccgatttaagcggcagtagtctggctaacatcaacggatctctattttcgaatttaaccatagcggattccttagattttttgttcaaacacacgcactgaaaatgcggcgctatgccccgtaagtaattctgtctgttgcggctcagcgacatcgcgcgaagcaaaaggaggtacaggcagccatttcccggcgggtaaagtcaattcacaggcttggtcggaggcattaatcaccactagccaacgttgagataaacaaatctggagctttctttgaaagccctgctcccaggctaaggcactcatttcctgcccctgcatgttcaaccattgcacactgccatcgccttcctgccaccagcggtcttgcgtaagcgccggtattttttgccgcaggcggataagttcggcagtaaagttcgccagatcgctatctgcctgtgtccaatccaaccaggtcatagcgttgttctgacagtaggcgttattgttaccttgctgactgtggccatgctcatcaccggccagcagcattggcgtacctagtgaaagcagtaacgtgctgagtaacgcccgctggcaggccttgcgcctatgccagaccgcctcatccgccgttaatccttcattcccgaagttattgctgaaattactatccgtaccgtcgcggttgtcttcaccattagccagattatgtttttggttgaaacacaggagatccagtaaggtaaaaccatcgtgtgaagtgatcatgttgatactggcggaaggcaaacgctcccgctgagcatagatatcggcagagccggaaaaacgttgggcaaattgccccaaagagaattgattgtgtagccagaaacgtcgcattccatcgcgatattggtcattccactcgctaaaaccgcgagggaaatggcctacctgataaccgccccagccgatatcccaaggttctgcgatcattttgcaatgagccaaccgcggctccgcttgtaacgcttggaaaaagggtgcgtcctgatgaaattcaggcgtgcgccccaaaatcgcgccgagatcgaagcgaaaaccgtcgacgtggcaactctcaacccaataacacaggcagtcgattacccaacgaaccacttccggatgatccagcttgagcgcgttaccgcagccggtttgattctcatactctccctgcgcgttcagccagtaatagctggcattatcgatccctcgcagcgatagcgttggcccttcagcgtccagctcggcgctgtggttaaacaccacgtccagaatgacctcaatgcctgcacgatgcagggcttttaccgcatcccgcagttcccgcagcggtgagaaaccttcccgcccggatgcataatccggctctaccgcatagggcgctaatacgttgtagccccaatagttggttagccccagtttctgcactcgaggttcatccacatgatgctgaatcggcagcaattccagcgcggtaataccgagctttttcaggtaatcaatcatcacaggatgagccaaagcaccatagctgccacgtagcgtctcgggaatgtcggggtgtagctgagttaatccgcgaacgtgagcttcataaattatcgtattgccccaaggcaccgccggcgggcaatcgccctgccagtcatattcctcatgtaccaccacggattttggcatcgcatcggcgctatcctgctgatcggcatgatccattccgccgaacaggcgcggatcgtcatcaacgcgtccttccactgcacgagcacagggatcgagtaggagtttctgcgcattaaaacgatgtcccgattggggatcaaacggcccgctaacgcgaaatccgtaacgctgaccaggctgaccgccgggtaaatatccatgccagatatcgccgctgcgagcgggcaacggcaagcgaacctcccgccccgcttcgtcgaacaggcacagttctacgtcataggcatgagccgaaaacagggtgaaattaatccctgaaccgtcaaaatacgcgccaagaggagtaggagaaccagtctgtaacgtggtcatgctatccctccctcagcagataaagagtggcgagcggcggtagagtcagcgataaagattgatcctggttatggctgccaatctgttgagtatcaatcgcgccctgattacccaaattactgccacaataataggttgaatcggtattcaacacttcgcgataccgtccggcgcggggcacgcctactcgatagttatagcgcggcaccggggtgaagttactgatggcgatcaattcattacctgccgcatcacggcgcaggaaagcaaaaactgagttttcatggtcatctaccaccagccattcaaaaccttccggctgataatccagttcgtacagcggcgcattatcttgataacaatggttaagatctcgcaccaaacgttgaacgccgctatgccagccgttttcgtcatcgagcaagtgccagtccagactggtgtcaaaattccactcccgcccttgagcaaattcgcatcccataaacagcagttttttgccgggatgcgcccacataaagccgtaataagcgcggaggttagcgaatttctgccaggcatcgccgggcatccgatccagaatcgagcgtttgccatgtaccacttcatcatgggaaagcggcaacacgaaattctcggtataggcatacaacatgccaaaagtcattagattatggtggtatttgcggtgaaccggatcgagctgcatgtaattgagcgtgtcgtgcatccagcccagattccatttgtaattgaaacctaaaccattggcttctggcggcaaggttacgccgggatagtcggtggattcttccgctaacgtcaccgcgccgggtcgttctacgccgagggtatggttggtgtaacgcaggaaagaaatagcttccagattgtctctgccgccatattggttaggcacccactcgccttcggcccggctgtaatcccgataaatcatcgaagcgaccgcatctattcgcagaccatcgataccaaaacgttccagccagtaaaaagcgtttcctgccagatagttgcgaacttcatttcgtccgtagttataaatcagggtattccaatcctgatgataaccttcacgcggatcggcatattcgtacagcgcggtaccgtcaaactgcgccagaccgtattcatcactagggaaatgacctggaacccaatccagaatcacgtttagccccgcctgatgggctttctcaatgaattgcctgaaatcctgtggcgttccaaagcggcgggtcggtgcatacatgcccaacggttggtagccccaactgccatcaaacggatgctcactcatcgggagtaattcgatatgggtaaaacccatatatttgacgtaatcaaccagttgttcagctagttcgccgtagctcagccagaaattgttttcggtatgtcgccgccaggaccccagatgaacttcataaatagaaactggcgcattgagcgcattggctttttgtcgaatgggagagttctcaacaatatcaggcagtgggctaatcagagaggccgtttctggtcgcatttgcgcttcaaaagcgtaagggtctgcttttaggcgaatatttccattactgtctattatctcgtatttatatagctgtccggcctgtacacccggtaaaaaaacttcccaaataccgttttcttttctcagcctcattggttggcggcggccatcccagaagttaaatgcaccaacaaccgacactcgcttggcattaggtgcccaaaccgcaaaactgacgccttccaccccgtctaaagacatcaaatgagcacctaaacgttcataggggcgcaaatgcgtaccttccgccaataaccagctatctatatcctgcaataaggggccaaatcgataaggatcttcgataatttcagtactatccgcccaaataacagctaactggtagcgaaatggatttttacgacgaggaatgacagcggcaaagaagcccctggaatcgatacaatcgagccgagtgactttcttattggttttgcagtcaactacccatacttctttagcatcaggcagcagagcacgcacttgcagcatatcggcaactttgtgcataccaagaatggaaaaaggatctgaataattaccacaaataacctgattaatcacattttgctcgggaagtgctgacattttatctttcctatgactaatagcatgatttacaagaaaaaatcattaagataaataaaaattcaacttatctatcatgcaatccatttaccgtataaatcatgacgacgatcaaaatgacgatttttttagcttaaaatctcaaaaaaccaccctgataaatttcaatcccggctcagagttacccttgtgacaatgcgcgccccaagctataagcatagtcaaaggtgagtaaaaaatggttaagcaatcaaggaaatccctttccagcactaaaaggaataatccggttaatttatttcgggttagcggcagttattcactcaaattggcactttggtagcagatctcacggtctgtgtttttttatatttagttgttcgagttaaaattttctcattcatgccttcgttataatggcctcggaaataacggaggcaatacagcatgggcgttagccagaccgaactgattttttcattactgcaacaaatgtgcgtatatctggttatcgcatacctgctcagtaaaacaccgcttttcattccattgatgcaagtcaccatccgcttgccgcacaagctggtgtgctatctcaccttttccatgttttgcatcatggggacttatttcggcctgcatattgatgattccattgccaatacacgtgctattggtgcggttttaggcggcgtactggggggaccatccgtcggttttctggtcggcttaaccggcggattacaccgttattctctgggaggaatgaccgcgaccgcctgtatgctctccacggtcgcggaaggtctgataggcggcttccttcataactacctgattcgtaggaatcggctggatttactgttccaacctttagtgattgctggcatgacgttagtggcggaagtgctgcaaatgctgattattctggcggtttcgcgccccttttccgaagcggtggaactggttgaaaatattgcattgccgatgatgatcaccaataccattggcgcagctatgttcatgcgcatcctactggatcggcgcgctattttcgaaaaatacaccacggcattttcggctaaagccttacagatcgccgccagagcagaaggactattgcgacacggatttgatcagcaaaacagtatgcgagtagcgcggattctgtatgaggaattgggcgttggggcggtggcgattaccgatagagaaaagcttctggcctttatcggcaccggctcagatcatcatattgtcggttccgcgattacttcacaccacactcatcgagccatcggaatggatcaggtggtttatgccgacggcaacgcggtgccctatacctgttcgatttcacccacttgcaaactaggctctacgctggttattcctctacgaggagaagaacatcgcgtcatcggcagcattaaactgtatgaaccgaaaaccaagctgttttccagtatcaaccgcacgctaggggaaggcattgctcaccttctatcggcgcagattatggcgggtagatttgagcaacaaaaacaattattagcccagtcggagatcaaactcctccacgctcaggtaaatccgcattttctattcaacgccctcaataccttatcggttgtgattcgtcgcgatcccaatcacgctcgcaaactggtgctttcactttccaccttcttccgtaaaaacctgaagcgcagccacgatgtcgttactctgagcgatgaaattgagcatgtgaatgcttacctggaaattgaaaaagcgcgctttgccgatcgattgaacgtcaatatcgccctgccagaaaatattctggctgcccgactacccgcgttctctttgcagccggtggtagaaaatgccattaaacacggaatttctcagatgttcagcaatggaaatattaccctacgcggcaatatgcaggatggaatcctgacgttggaagtagaagataatgcgggattgtatgaatccaagcccgacggggacggattgggcatgaatctggtcgacagacgtatcaaggtgcgttatggccagcagtacggcgtgaccgtgacctgtgagacggacatatatacccgtatctcgattaaattaccgttccataccgcagcagaaaattgaattaatccgctgatatttagcgataaaaaaaggttgctagcatcgcaacctttttgattttttagcgacttcagaactacagttttagagcggcagcgattacgccagaatccgcagcatacggcgtaacggttctgccgcgccccaaagcaattggtcgccaacggtgaaggcggataaatactccggccccatgttcagcttgcgcaaacggcctaccggcgtattcaacgtgccggtcacggcggcgggagtcagctcacgcatcgtcaactcgcgatcgttcgggatgactcgtacccaatcattgtgggttgccagcaacgcctcgatttcaatgagcggaaggtcttttttcagtttcagagtaaatgcctgactatgacagcgcagagcgccaacacgcacacataacccatccaccggaataacgctgctggtattcagaattttgttcgtttccgcctggcctttccactcttcccggctctggccgttatccaacgctttatcaatccacggaatcaggctgccagccaatggcacaccaaagttatcggttggcaacgtgccgctgcgtgtcgccgccgtcactttacgctcaatatccaaaatggcagaagcagggttctgtagctctttggctacgccagcgtgcagcatacccatttgggttagcaactcacgcatatgacgagcaccgccgccggatgcagcctgataagtggcaacagacgcccattcgaccaggtcattggcaaacaggccacccagtgacatcaacatcaggctaacggtgcagttaccgccaacaaacgttttgattccctgatttaacccttgctgaatcacatcattgtttaccggatccaaaataataatggcatcgtctttcatgcgcagagaagaagctgcatcgatccaaaaaccctgccagccgctggcacgcagctgaggataaattccgttggtataatccccgccctgacaactaatgataatatccagagcacgcagcgcgtcgatatcataagcgtcttgcaaggtgccctgctgaccggtaaaagtaggcgcagcctgaccgtgctgtgaagtagagaaaaagaccgggcggatgccgtcaaaatcgcgttcttcgatcatgcgctgcatgagcacagagccgaccataccgcgccagccgataaaaccaacgtttttcatgtttactgtcctgccttggaagaggtgacaaccgattaagggatgcctgtcttgtggcgctgcgccgccgaaaatggcatggcagactgactctaagagagacctgataccaccttacaaaatatgtaaaaagtggcaagttaatttaatcgatgccggaggaattcacagtaatcctcctaatacccgagcgtctctggtttgatataccggaaacttttagtccgttgaggtcacaatgacagaaatgattgcggcaaccgtgttgctgtttttgataatggatcctttaggcaatttgcccattttcatgtcggtgctcaagcatctggaaccgaagcggcgacgggtagtgctgattcgcgagctgcttatctcacttatcttgatgttgatttttttgttcgcgggcgagaatattttggcgtttttgaacttacgcactgaaaccgtttcgatttccggcggaatcattctgtttttaatcgccatcaaaatgattttcccttccaatgaaggtcactcaaccgacttacctgctggagaagaaccattcctggttccactggcaattccgctaatggctggcccatcaatattggccacactgatgcttctttctcatcaatatccaaatcgcatgagccatttggtgttagcgctgctgatcgcctggggtttatcctcagttatcttgttgatgtctggtgtatttttacgtctgttgggggataaaggcgtcagcgcattggaacgactgatgggattgattctggtgatgttatctacccagatgtttttagatggcgtcagagcctatctcacggcctaattcatcggcgacgacgataaaaacacacaaggggccacgattggccccgataaccaagcggtgccgaagctagactttatggctcagcgccgccacgcagcgacgtactacttcatcaatatcggcatcgatatccacgcaaatcacgtctttctcgtctgccagaggctcttccaaggtttcaaactggcttttcagcagatcggtgggcataaaatgacccgaacgagcttttaatcgctccataatcacgtcaaagctgcctttcagatagagaaaaaccatatctttattgccttcccgcaggcaatcgcggtaacgacgttttagagcagaacagacaataataccggtttcgtttttatggttcaggctgtaggccgcgtcgctcaaacgttccagccacggcattctgtcgtcatcatttaacggatgcccgctggccattttttgaatattggcgcgcggatgcagatcatcaccgtcaataaatttggcgtgaattgcatgagcaacggcttcacccaccgtcgtttttccgctgcccgatacgcccatcacaatgatgctatgtcctgccataagtttgatctctatctcagaatgggaattttaccctgtttgacggttccgtattttaacatgttaccggtatcatgataccggtaacaaatggagatgtgacttttatcacaaagggaagaacaccgggttttgtactcaatcgcgcaatcacgccagcctgtttaaagactgagcgtaataataaaaggaaggttcttatcccgttacctgtcctggataagcaccctaccccactaatttcgcgttgcagcaaaatgagcaatatcaatacctatagctttcagattacagccaaacggcaattggcctccatccgaggagcttagtccgctaagtgaatcgagatagccaaaacagccggtgtcgctgcaacgggaaagagacaaggtacaaagtcagaaaacgccgctgcggcgagaaaaaagcagggtaaataaatcataactaaaagcgataaataggttggagaaatgctatgccattagtcattgtcgcggttggcgttgccatgctgctgttactgatgatccgtttcaagctgaacgggtttatctcgctgattctggtcgctctggcggtcggaattatgcagggtatgccggttgataaagtggtcggctcgattaaagccggggttggcggcacgcttggcagcctggcgctaattatgggctttggtgccatgctgggtaaactgctggcggactgcggcggtgctcaacgcatcgctaccacgctgattgataaattcggcagacaacatattcaatgggccgtggtactgacaggttttaccgtcggttttgccctgttttatgaggtcggtttcgtactattactaccgctggtattcagcattgcggcgtctgcacgcattcctttgctgtatatcggtgtgccaatggctgctgcgctttcggtcactcacggctttctgcctcctcaccccggcccaacggcgattgcgaccattttccatgccgatatgggtaaaaccttgctgtacggcaccttactggctattccaacggtcatattagctggtccggtttatgctcgattcctgaagggcattgataagccggttcctgaaggtttatacaacccaaaaacctttaccgatgaagaaatgccgagctttggcgtcagtgttgcgaccgctctggtgccggttattctgatggcgctgcgtgccgtagccgagatgattttgccaaaagggcatccggttctggcttatgccgaattcttcggcgatccggttattgcgacccttatcgctgtattaatcgctattttcacctttggcctgaaccgcgggcgctccatggaatcggtaatggataccgtaaccgactccattaaaatcatcgctatgatgctgttggttattggcggtggcggcgcattcaagcaggtattggtggacagcggcgttgaacaatatattgccggtatgatgagcggcagcggtgtatcaccaattctgatggcttggtctatcgcggcactgttgcgtatcgcgctgggttctgccacggtcgcggccattaccgccggaggtattgttgctccattgattgccaccaccggtgccagcccagagctgatggttattgccgtcggttccggcagcgtgattttctctcacgttaacgatccgggcttctggctgtttaaggaatatttcaatctgaccattatggaaaccattaaatcctggtcagtgctggaaaccatcatttcagtatgtggattagtcggctgcctgttattggctatggtgatttaattcgctgagtttgaaggttagttcacacaaaaaaggcctgctgtcgaaagatagcgggccttttctttaacgccattattcagatactgccaccgggcagaatagtgaagccgacatcgaccattttgggtgacaccgattcaccacgcagcctggcaatcagacgttctgcacctatttgccccattttttcgcggggagtcagtacgctagccaaacgcggcaccatcgactgcccaatatcatggccgtggaaaccagcaatcgccatatcctgcgggatagataatccctggcgttgacattcgaaaaacgcgccgatggccaagtcatcattggtacagaaaatactgtcgatctgcggataactaacctgcgcttcacgcaacagctcgccaccggcagaataggaagatgagcggctggtcataatactgaccggctctaaacccgattctctcatcgcctgctcgtaaccctgctgcttaatcaccgttcgctcatcctgacgcgcaccgaaatagactacgtgacggtggccctgagtgataatttgctgagtcatctggcgagcggcttcaaaattgttaaatccaaccgccagatcgatgcagggggaaacacaatccatcaattcgatcaccggaataccggacacctgaatcatttttaaggtacggggagtgtgattccgttcggagagaatcagaccgtcgatgttataagacagcagcgaggtcaggcgttgttcttccagctctttctgataaccatagtgagccagcatggtttgatagccgtgaacgtctgtgacgctctcaataccgcgtaaaacctcggcaaatacctgattagttaatgaaggcaataatacgccaatcgcccggctggtggcgtttgacagaatatccggcgcacggttggggatatagcccaactcatccaatgccaccgcaattttcccctgtagcacggcggaaacctgctgcggattacgcaaatagcggctaaccgtcattttcgtgacgccaaccatatcagctacatcttgaagcactggcctttttttcttcattatcaatgaactggcgcaagagagacgggcggggattttaacaaaaaaaagggtataacgcgatgcgcataccctttttagccgataaatgaaggttaaaccggtggcagatcaaataacaatatctcactgtcttcatcggcatgaatcgacaatgcggtttcatcccaaatggcgaaagcatcgctggtgcctgcgtgatgaccattgatagcaaccttgccacgtactacctgaatccagattctgcgctccgcctgaatctgataaacagattgttcatcttttttcagcgcccagcgcgatagcgtcatatcttggaacactttcagagaaccgtcgcgagcatccggagacagcaccaactggcgcccctgtgggttatcaaagcgcttttgttcatagcgcggtggtaaaccattagtttcaggaataatccagatttgatataggtgcaacggctggtcactacgaccattgtattcagagtggcgcacacccgtgccggcactcataatctggaactcacccgcatggatttgttctttattgcccatgctgtcctgatgttctacggttcccgatagtacataggttagaatttccatatccttatggggatgagtaccgaaaccctgcccagcgtcgatcacgtcttcgttaatcacccgcagcgccgagaaccccataaagttagcgtcataataatcagcgaatgagaaggtatgccagctatctaaccagccgtgattagcgtgaccgcgttcttctgctttgcgtagataaatcatattcaattctcctcaacgttttctttagtctagatgtcgcaggaaaatatgaaagcgtaaaaaactcatccctctgttcaaataattcgacaaagaaaaaagcataaaaacaaagcgtgtgcagaggcagaaaatgcggaaatcaaacaagccgttgcgactattccaccgagaaaaggcaaaaaaaaagccagcacccggctggctaagtaaacactggaagcaatgtgagcaatgtcgtgccttcgtcatgtgaacacctaaactttgatggtctcacttgaaagcatgacaatgataatcattatcactctcaactgtaaagcattatttttaatcaatgcgaatataattgactgcgatgaataaaccgatactttgttaggttattcaaacactaatcaataggaaaagccctatgtctcatgcgcaaatacgtccggtagaaccttctgattatttggctctgcaacagctatatgcacatccgaaggtgtatcgcgacaccttacagcttccgctacctgctccggatttgtgggcgaagaagctggggactcccgcgccaggtatctattattacgttgcctgtatcgacggacaaatcgcaggccagctcagccttgagacaatacaaagaccgcgccgcaaccacgttgccaccttcggcattgcagtagacgcgggtttcttgggccagggagttggcagtgcgttgatgaaaaccatgattgatttatgtgataactggttgaacatcaatagaattgaactaacggtattcgttgataatgatactgccgtagcgctgtacaagaaatttggttttgaaatcgagggaaccagtaaacgctatgccttacgcgacggtaaatatatcgacgcttatcatatggccagggtaatagacccaaaataaatcacctgaacacgcaattagcggaactttcctctcacttatttacacatcagcccgaagatcgtgaccgatcgcgtcacgatctgtttccatctctccttgaaataaaacacgacagcgatcacactccgctgccataaatcaacgaaacggcgtagaatactgctcgcttttaatggacagatttccgacagaatagtcgctcacagcgtgaattgatgatgaggttgttgtgtttgagagttatggagtactcaatctttggacgtatgtcctaggtgccattttcattattatcgtgccggggccaaacaccctgttcgttctgaaaacaggcattacccgcggtgttaaagaaggctataaggctgcattagcggtgtttattggcgatgcagtactgatattttgcgcctatgtgggaattgcctccctgatccgctcttcgcctttcctgtttacgctggtcaaaatgctcggtgccatttacctcttgtatttggggcttaaaatcctctacagcaccttggtgaaaaaaggtcagagcgaagcaaccgagatcgtggaacacactttccgcaaagcgctgaccctgagcctgaccaatcccaaggccattttgttctacgtttcgttttttgtgcagtttatcgatcaaagttatgcccacaccggcctgtccttcgtgatactggcggtgattctggaaatgataagctttgtctatatgtcgctgctcatttttgctggcgcagcactaacccacttcctgagtgagaaaaaacgtctcgccaaactgggtaattcgatggttgggctgcttttcctcggttttgccaccaaactggctaccgcagcctaaaacctaccgatataagccgatatcaatagaaatggcgccatcatcaggcgccatttttgttgtgcacagaaaacctccagctaggctggaggttccgtaaagctttcagctttgagccagttataaaaaccccttttgatttgttaaaacagtttgcggtctggcaactgcaaatgttcaacaagaaatcaaaagkgggtccctatgagggatgaaaagagcttagcgcacacgcgatggaactgtaaatatcacatggtttttgcaccgaagtaccgaagaaaggtgttctacggggaaaagcgcaaagcgataggcagtatcttaagaaagctgtgcgaatggaaaaacgtgaatattctggaagcagaatgctgtgtggatcacatccatatgcttctggaaatcccgcccaaaatgagtgtgtcgggttttatgggatacctgaaaggaaagagcagcctgatgctttatgagcagtttggcgatttgaagttcaaataccgtaacagggagtgctggtgtcgagggtattacgttgatacggttgggaaaaatacagccaggatacaagaatacataaagcaccagttggaagaggataaaatgggtgagcaactctcgatcccctatccgggcagcccgtttacgggccgtaagtaatccataaatgcaaatgtcagatcgcgatgcgcctgttagggcgcggctggcaacagagccttataggcgcatatgaaaaacctccggctatgccggaggatatttatttatatccatcggttctttagatgcaaagctagcgggctatttgctcgccagcgcctgtgcgcacgcccaggcggagctccatgcccactggaagttgtagccgcccagccaaccggtcacgtccaccacttctccgataaaatacagccccggaactttatgagcttccatagttttggaagacagctcctgcgtatctacaccgccgatggtaacttctgcggtgcggtagccctcagtaccattaggttgcacccgccattcttgcaacgtcaccgccagcgctgcctgctgaggcacattaagctgttttaaggtgacgtcaggtatctgacctaacagctgtaagcactccaccaaacgtttcggaagcagctgcgccagcgtgttcttcaaactttgattcggatgtgcctggcgctcgctattcaggaaagcgtccaaatcggtatcaggaagtaagttaatgctcacatattcgccaggctgccaatagctggaaagctgaagaatggccgggccagacaggccgcgatgagtaaacaaaatactttcgcggaaactgacgccgttttctgccgtcactaccgcgggcactgaaacgccggagagagtttgtagatgctccagcagaggtttatgcagtgtaaaaggcaccaacgcggcgcgggtcggcaaaaccttcaggccaaactgttcggcgattttataaccgaaaggcgtcgcgcccagccccggcatcgacaagccaccggaagcgataaccagtgaggaagtgctcactttatgttcatttatctgtaattcaaagcccgcgtcgattttctcgaccgccagaatctcgctgcgtaaacggatagttacctgacctgattcgcactctttcagcaacagttccaccacttgctgcgcggaatcatcacaaaacagctgaccgagggttttctcgtgataggcaataccgtgtcgattgatcagatcaatgaaatcccattgggtataacgcgccagcgcagatttacagaaatgagggttttgcgaaagataagccgcaggttccgcgtagagattggtgaaattacagcgcccgccgccagacatcaggattttacgcccagcctttttgccgttatccaccagcaatacccgacgccctaattgccctgcctgagccgcgcaaaatagccctgcggcacccgcgcccaccaccactacgtcaaactgttccactttcggcctctctctgtaaaatcattatcgccgcaaaattgctcatatttcgcaattttaccgcagtgttcaccacaaataaccgaataatcagcggcggaggattgtaaggccctaacagaaagatcgctatagtaagaaaatgttagattcagtaaatcagagtaacttgctgatatctcatggttatgttcatggttatgatgcatctatccacatttatatcaaagaaaggtcattttttccttttccccaacccctattgtcaccgataatgcgccgcgttcatgtccacaaactggcgtaacgcttatgctacatcttttcgctggcctggatttccataccggccttatgttagttcttgctcttttgttcgtgctgttttacgaagccatcaatggttttcatgatacagccaatgcggttgctaccgtaatttacacccgtgccatgcgttcacagatcgctgtggttatggcgggggtattcaactttcttggcgtgatgctgggcggtttgagcgtggcctatgccatcgttcatttattgcctacagatctcctgttgaatgtcagttcggctcatgggttggcgatggtcttctccatgttgttggcggcgatcatctggaatctgggaacctggtacttcggtattcctgcttccagctcacatacgctgattggtgccatcattgggatcggcctaaccaacgcggtgatgactagtacatccgtggtggatgcactgaatattccaaagatgatacaaatcttcctatcactgattttgtcgccgttagtgggcttaattattgctgggttgatggtattcctgctgcgtcgttactggagcggaaccaaaaagcgagctcgtattcacttaacgcctgctgagcgtgaaaagaaagatggtaaacgcaaaccaccgttctggacccgtacagctctgattttatcggctatcggcgtgagtttctctcacggcgctaacgatggtcagaaaggtatcggcctgattatgttggtgttgattggcgtcgcaccggctggttttgtcgttaatatgagcgcgactggttacgatattgcccgtacgcgggatgccgtaactcatttgcagcaatattatcagcaacacagtgaagccttgccgcacgctatcgcgttgaagcctttggtccccgcaccagagactctgcctgatacaccggcgcagttccattgtgacagctctcgcgccatgattgctatcgaccatgcgcaggcactgttggctaacctgcaaagctacgacgacctgactgtggagcaacgcagccatatgcgtcgcttgctgatgtgtgtcgccgaaacggctggcacggttgccaagttaccggaaaccagttctgcggacaggcgtttcctgaacaacctgcgtaaagatttgctggaaaccgtggaatacgcacctacctggattatcgttgcagtagctttggcgctctctctgggcactatggttggctggaaacgtgttgcagtgaccattggtgagaagattggtaagaaaggaatgacctacgcgcaaggggtttcggcccagatgaccgcggcggtatctatcggtattgccagctacaccggtatgccggtttccacgacccaggttctctcctcagccgttgccggtactatgctggtcgatggcggtggcgtacagggtaaaaccattaagagcatcatgctggcctggattcttactctgccagtatcgattcttctttccggttcactgtactggatagcgttgaaattcatctaagcctggctggatgactccacgttaccgcaaataaaaaggcggcctcatcatcggggtcgccttttttagttggctatcatcaaaaatcatctcagtaccatagagccagcgccatcaagctgacaacgaccaagccgcacagggcgctggtgagaatgaactggccgcgcagtctttcacagcgacggataaattccggatcgtggtggtcggtataacgctgggcgtagatataacgcactagccgaatttgtttactgggttgtccgtgagaggtgaaaaaaccgcccccatccacatattgatacagcaatggatcacagccgcgtaacaccactaatagcgcacgtagagacgaataataacgcgccatattcaccacgcacaccacacataaagcccagaaaagcgcgacggtactgatcatgattccccctccagcgatatttcgcgttaacgacacctttgattcgccgttacgccatcgcccgctctagccattacaaccatccccgaggcgcagaaacatgcctctccatcaccttttttatatatgagccgacgctaccgctaaaattttgcctaacccatttaccagtgtaggaaatgaaatcagaaatagcctgataatctctgatttatccggtcacattttgtacgcaactgatgcttttaggcgcaaatttcagtgaaaaaccgccagaaacagctcaaaatagttagtctctcttaacttaaatgcagagataaaagctagcgaaccggcgtttttgatcaatactcactgctttatcagtactataattatggatatagcgagccaaatgattaccggataaacggccaaatatttgacaacagcggtctgagcaataggattaagccgtctattggtgtaaaacagtgacttaagctttaacgcgtacaattaaaagcctgcgttgtgatcggtgaaacacttcgcttatggatcatagtgatagtatctagacatagccttagcgcccgttcagttacctgaatgattgcttacccattaattagcattatggaaggagtttacttatggcttacaaacacattctgattgcggtagacctgtctccggaaagcaaggtgttggttgaaaaagcggtctccatggccaaaccatacaatgccaaagtgtccctgatccatgtggatgttaactattcggatctctataccggcctgatcgacgttaatttgggcgacatgcagaaacgtatttctgaagaaacccacagcgcgctgaccgagctatcccaaaatgcaggttatccaatcactgaaaccttaagcggtagcggcgatttgggccaggttctggttgatgcgattaaaaaatacgatatcgatctggtgctgtgtggtcaccatcaagacttctggagcaagctgatgtcctctgctcgccagctgattaataccgttcacgtcgacatgttgatcgttccgttgaaagacgaagatgacgaataataaaccacgattgaattaatatacatttagaacgcctgcctatgcaggcgtttatcattatataaccccaaatccctttgtcccccgccctaataacttcgttatatttcagtgagaaaacccttgcggtatgattataaagcggtgatatagtcaagaaagacacaacatcgccctctcactatttcgccatactcattccaataagaaatcgttagcggggatctaccatgtacaaaggaatcttttttgatgaatgatttagcctctctggagtcgtttctagaatctttacaacaacgtgatgcccaccagccggaattccttcaggcagtccgtgaagttttcacctccctatggccattcctggaacagaatccgcgctatcgcgagcaaagtctgctggagcgtctggttgaacctgagcgagtcatccagttccgcgtatcgtgggttgatgataaaggtcaggtacaggttaaccgcgcgtggcgggtgcagttcagctccgcaatcggcccttacaaaggcgggatgcgcttccatccatcggtaaatctttcgattctgaaattcctcggctttgagcaaactttcaaaaatgctctcaccaccctgccaatgggtggcggaaaaggtggatccgacttcaaccctaaagggaaaagtcaggctgaagtcatgcgtttctgtcaggcattgatgaccgaactctatcgtcatcttggcccagacaccgacgtgccagccggtgatatcggcgttggcagtcgtgaagttggatttatgaccggcatgatgaaaaagctgtccaacaacaccgcctgcgtgttcactggcaaaggtttgtccttcggtggcagtctgattcgcccagaagctaccggctacggtctggtttatttcaccgacgctatgttgaaacgccacggtttgggatttgaaggcatgaaagtggcagtatccggcgcgggtaacgtagcgcagtataccattgagaaagcaatggaattgggcgcgcgcgtgattaccgtttccgattctggcggcactctggtagatgaggctggctttacgccagaaaaactggcccacctgtctgaaatcaaaaaccaacgttatggccgcgtggaagattatgcccgcgagcgcaatctgacctatctgacgggtgagcagccttggaacgtgccggtagacattgctctgccttgcgcgacccaaaatgaattggatctgcccgccgctcgtcagcttatcgccaacggtgtgaaagccgtcgcggaaggcgcaaatatgccaacgaccattcaggccactgatgcttttatcgaagctggcgtgctgtttgctccgggtaaggctgccaatgccggcggcgttgccacatcgggtttggaaatggcgcagaatgcggcacgcctgagctggaaatcagagaaagtggatgtgcgtttacgtcacatcatgctggatattcaccagtcttgcgtggaattcggcggagaaggaaaacaaacgcaatacgttcacggtgccaatatcgcaggctttgtaaaagttgctgatgccatgctggcgcagggcgtgctttaagttaaggtcggataataaaccccattctggcaaaaacgtcgcgctggaatggggagtttagacaacgaatttaaacgatatcgcctaaggcaaatacagatcgaaacggtgacttttggtcgtaatggcggcctgagcgggcacgccagccaaaggttcagcgtagtcaggccgcttcactaccactcttttggtggccagtgcgcgcgccggggccaatagtccatcagcatcctcatccgcgccaaccaatgactgaaacactcgcatttctttcttcaccaacgcgcttttctgccggtgcggatacataggatcgagataaaccacttctggacgcggatcgagatcggccaacgccgttaggctggaagcatgtagcaaagtcatacgttcctgtaaccagccaccgatttcagggtcctgataaccccgccgcaggccatcatccagcaacgcagccactaccgggttccgctccagcatccggactttgcagcccaaagccgccaaaacaaaagcgtcgcgccccaaaccggcggttgcgtctaccacgttcggcaaatagccttttttgataccaacggctttcgccaccgcctcaccgcgtccgccgccaaaccgacggcgatgagccagagtaccggaaacaaaatcgacaaaaatcccgccgagcttgggttcatccaacttacgcagctccaattgcgttggcgttaacaccagcgccatcgtcgcctgctcgtcagaaatcaaaccccagcgttcagccagaatagataaggtgccgggatcggcaccttcttcacaaattaaacgaatactcacgcgggataatgcccttcagacttaacctttaataccgtagtggcgcagcatagcatccaactgcggctcgcgcccacggaagcgtttgaacaacgtcatcggctcctcggaaccaccgcgagataaaatattgtcgaggaaagattggcctgtttcagcgttgaaaatgccctcttcttcaaagcgggagaacgcatccgccgacagcacttctgcccacagatagctgtaataacccgccgcataaccaccggcaaaaatatggctgaaagcatgggggaatctaccccagcttggtgatggcactacggcaacctgttttttcacttcctgtaaggttgacagaatctgcgcacctttagccggatcaaactcgaaatgcatacggaaatcaaacagtccgaattcgagctgacgcaggataaacagcgccgcctgatagtttttcgccgccagcatcttatccagcatttcctgcggcaaaggctcattggtttgataatggccagagataaacgccagcgcctccggctcccagcaccagttttccataaactggctcggcagctcgaccgcatcccaaggcacaccgctgatgccggaaacaccggcggtatcaatttgggtcagcatatggtgcaaaccgtggccaaattcatggaatagagtcgtgacttcattatgggtaaacagcgccggtttatcaccgaccgggccattgaagttgcacaccagataagccaccggcttttgcagctcaccgttagccagacgcagactgtcgatacaatcgcccatccacgcaccgccgcgtttgtgttcgcgagcgtacaagtccagatagaagctgccgcgcagctcgccctgagcatcaaacagatcgaagaaacgcacgtccggatgccaagtatccacgccctgccgctctttggcggtaataccgtaaatgcgtttcacgacctcgaacagaccttctaccacgcgctgttccgggaagtaagggcgcagttgctcgtcgctgatggagaataaatgctgcttttgtttctcggaatagtaaggaatatcccacgccgctaactcgctgacaccgaagtgttgtttggcaaaagcacgcagctgcgccagctcttcttctgcctgcggacgtgcacgtttggccagatcattcagaaaattcagcacttgctgcggatcttcagccattttggtcgccaatgaatgatcggcatagctttcaaatcctaataactgagccagttcgtggcgcagagtcaggatttcagccatgatttcgctgttatcccacttaccggcgttcggcccctgatcggaggcccgggttgcaaacgcgcgatacatttcttcacgcagcgcggcgttatccgcgtaagtcatcaccggtagatagctcggcatatccaacgtcagcagccagccatccagctctttggcttcggccatcgcgcgagcggcggccagagcgctttccggcaaaccagccagctctttctcatcggtaatcagtttggtccagcccatagtggcatccagcacattattgctgtaggtcgaacccagctcggacagacgcgccacgatttcaccgtaacgtttttgctgctcttccggtaaaccaataccggacaattggaaatcacgcagcgcattctccaccgctttacgctgcggcggagtcaattcggcaaagccggggccttctttcaggctgacgtaagcctgatataaacctttatgctggccaacccaggtgccgtattcagacagcagcggcaggctttgctcgtaggcggtacgcaattccgggctattttttaccgcgtttaaatggccgacaggcgaccagatgcgagagagacggccgtcggattctgccagcggctggcacagattatcccaggtgaaaggacccggttgggccacaacccgctccaccgattgacgacattcatctaaagcggattgcaccgcaggcacgatatcttcagggcggatagccgaaaacggcggcaaggagaacggagtcaacagcggatttgtcatagggtgtcctgattatagttgtcgtcctgacgatggtttactcatgattttcctaccgtcagatgataaatgcggatgaacatttaacatgaggtctgtcgcgcggaaaatcaatggctggcggcatcattccctttgatagataatgctgcctaagccgcaggagaagccgcaaatgttaagttatcgccacagttttcacgcaggcaaccatgccgacgtactcaaacatactgttcaaagcctgattattgagtctttgaaagaaaaagaaaaacctttcctttatctagatacccacgctggcgcaggccgctatcagctaagcggcgagcacgccgaacgcactggggaatatctggaaggtatcgccaagatttggcaacgagatgatttaccggctgatttagctccgtatatgagcgccattaatgcgttgaatcacaacgggcagctacgttattaccctggttcgccgctgatcgcccgtcatttgctacgtgaatatgacaaaatcagcctaaccgagctgcatcccagcgattacccgatgctgcgtaaagaatttgccaaagacgaacgctccaaagtgcaacgcgccgacggttaccagcaactgaaagctcagttaccaccgcagtctcgccgcggttttgtgctaatggatccgccttatgaaatgaaaaccgattatcaggacgtggtaaaagggattcaggaaggttataagcgctttgcgaccggtacttacgctttatggtatccagtggtattacgccagcaaatcaaacgattactgcgtgaactagaagccacgggcatccgccggattctgcaaatcgaactggcggtacgtccggatagcgatcaacacggtatgactgcctctggcatgatcgtaattaacccgccgtggaagttggaaaaacaaatgaccgatctgctaccttggctgcataaagcgctagtaccctctggtcacggccacaccttggtaaaatgggtcgtgccggaataatcgccgcgcctttcgctcctggccgggctgcaatccatgctgtccggctcattcaatattacccaatttttatcaccgtttagcgcaaaagctttctcgtcttccaacacctatcacagccatcgatgcaatctttgcgacaaagtgggatctggcgttaaactctttgcttctataaaactacactcatggaaatgatcctgatgaccaaacattacgattatctggcaattggcggcggcagtggcgggatcgcatcgatcaaccgggcagccatgtacggtaaaaaatgtgcgctgatcgaagctaaacagctcggcggcacctgcgtcaacgtcggctgtgtgccgaagaaagtgatgtggcacgcggcacaaatcgctgaagcgattcgcatgtacggtccggactacggttttgataccacggtgaaccacttcgactggaaaaccctgatcgccaaccgtaccgcctacattgatcgtattcatcagtcctacgagcgtggtttaggcaataacaaagttgatgtgattcagggcttcgctcgctttgtcgatgctcataccgttgaagtcaacggcgagaaaatcactgcggatcacatcctgatcgccaccggcggccgccctagccatccaaatattcccggcgcggaatacggtattgattccgacggtttctttgagctagatgaaatgccaaaacgcgttgccgtcattggcgcgggttatatcgccgtcgaaatcgctggcgtactgaacggtttaggcaccgaaactcacctgtttgtacgtaaacacgcgccgctgcgcagttttgatccgctgatcgtagaaaccctagtggaagtcatgaacaccgaagggccaaaactgcataccgaatccgtgccaaaagccgtgattaaaaatgctgacggcagtctgacgctgcaactggaaaacggcacagaagtgaccgttgatcatctgatctgggcgattggccgcgaacctgcgaccgacaacctgaatctggccgcctgcggtgtgaaaaccaatgaaaaaggctatatcgtcgtcgataaattccaaaataccaatgtaaaaggtatttatgccgttggtgacaacacgggtgcagtggagctgactccggttgccgtggctgcaggtcgccgcctgtccgagcgcctgtttaacaacaagccagacgagcatcttgattacagcaatattccaaccgtggtattcagccacccacccattggcactattggtttaaccgagccgcaggcgcgtgagcagtttggcgacgatcaggtaaaagtctataaatcctcctttactgcgatgtacagcgccgtcactcaacatcgccagccgtgccgtatgaagctggtatgcgtgggcgcagaagagaaaatcgtcggtatccacggaatcggctttggtatggatgaaattctgcaaggtttcgccgtagcagtaaaaatgggcgcaaccaagaaagacttcgacaataccgtagctatccacccgaccgccgcggaagaatttgtcactatgagataatcatttagagatgagtttctctatttgagtcatggaacgtgaagccgaaatgcaaatttcggctttttattgcttggaattcagcttcgctacaccccctctcctttcttacagctatatcaccaccgtctacatcagcgcgattaaatagaaatgacgataaaaagaggcgttgagtcacttaccgagtctgaacatcattgcatcttacaacatagaaacttgatgaatacataaagacagtgtatgaaaattgacatatagaaattatcaatacttactgaggtaacgatcaaattgcatttattcttacttgttcgaattacccagctctaagacattaatcaggtcgaaaaaataaattaaataccctttaaaatcaaaatattaaaaagaaaacctccggcgggaaataaatttaaataaactatcacttatataaaataatatgaaaataaaaagaataattaagtcaatgatgattcacaaaattaatttattgatgcgatactttgtttctaaatttatcccaagcgaatcagataactttattttctttttattactcacgatcaatgagaataaatagctcatgaaaatatattcgccgttcgcagcggttaatttagaacctaaaaattcatttaaaatataaaaaggaacatctatgaaacctatcaattgtaaaaatagtctgattacgattctgactctatgcaccctgtttggtttttctcattcctccgcgtttgccgcctcggttaatgatgacgcgtcggttatgccaagcctggtaaataaaaagattatggcgggtttctggcataactgggacagccaagaaagccgtggctatcaaggtggttatccgaagaatctaaaaataaacgaaacacccgcggcctttaacgttgtcattgcctcctttatgaaaggcagcggtattccaacctttaagccgtacaacgcaacggacgcagagtttcgcgcacaaatcggtgagttaaataaacaaggccgcgctgtgctcatttcattgggcggcgctgacgcacacgtggcattgaataacggtcaggaacaggctttcgcagacgagattattcgtttggttgaaacctatggttttgacgggctggatatcgatctggaacaaacggctattaatgcagctaataacaccaccgttattcccgccgcgttgaaaattgttcgggcgcattacgaacaacaaggtaaacactttatcatcagtatggcaccagaattcccatatctgacaaccggcagaccttacactacctatatcaacgccttggacggtgtgtatgactttattgcccctcagctctacaatcaaggcggtgacggcgtatgggtcgaagaagtaaacctgtggctggcgcaaaacaatgacgccaaaaaatatgaattcctgtattacatggccgattctattgttaatggcaaacgcggcttcattaaaatcccagccaataaattagtattgggtttaccaagtaacgttgacgctgcggcatcaggtacggtaaaaaatccgcaggacgtttatcgtgcctttgctgatttagagaaagcgggaacgccaatcaaaggcctgatgacctggtcggtcaactgggatcagggtaaagataaagcggggaatgcttataatcaggcattcgccaaggcttataccgacttgattcacggtaaataatattaaccgctcataaagttgttccgtaaggcagttttattagcctggggtacaaatctacagccggagctcttgttccggctgctttatatcaatactcttcaatttgcctgaatgcgaaaataaatatcagccaattaatcgattgaagccggcttccaaatcagcaattaaatcatcgacattttccagtccaatatgaacacgtaccaaagtaccctcaaaacctacgccgcctaccggacgaatttcgtccagttcttccggctgattagccagaatcagagactcaaatccaccccatgaatacgccatgctgaagtgctcaaaattatccagataatgagccacttgctcatcactgagacgagatttcaacacaaaggagaacaatccgcagctcccagtgaaatcacgtaaataaaactcatggccggggcaggatggcagtgctggatggttaacctgcgccacttccggacgagcggccagccatttggcgatctggatactgctggtttcatgctgctttagccgtacgcctaaggtgcgcagaccgcggctagcaacgtaagcggtgtctgcatcgaccatttgccccagcaaatacgaatgttcccgcaattgatcccaacagcgcgcattagataccgccgtgcccaacatagcgtctgagtgaccgacgatatatttggttccggcctgaatagaaatatcgatgccaaactccagtgcgttaaatagcactccggcagcccaggtattatcgatcataatcacgatattgggattaactgcccgaatagcctgcaccatgccgggaacatcctgaacttccattgtgatggagctgggagattctaaaaataccactttggtatttggctgaataagctcggcaattccagcgccgatcagtggagaataataagtggtggtgacacccagtttggacagcactttattgcaaaaatcctgcgttggctcataagcagcaccggtcattaatatatgatcgccggtggccacaaaagacagaatggcattggtcaccgctgcggcgccgcaaggataaagcgcacaacctgcgccgccttccaattccaccatcgcttcttggaaggaaaaatgggtcagcgtaccgcgacgaccataaaacaattcgccttttgcccggtttgctgtggcaaattttttcgcctttacggaatcaaataccagggaagaggctcgttgaataatggtgtttaccgatccttgggtaaattttttcgcccgaccggcagtcactaacgctgtttctaattttttagatttcattattttttccttttctggtgctggcatactcaaatattcacagcgacttacggacaatccgccacgctgtgtcgttatgtattaacaagtaggttcattcaccgcaggaagctcagcctgccgcttggaggattttttaccggtatatctttcgataatttgggctgcattaaggtcatgaatgacgttaattagcgttgcaggtgcatcggtaatggtgccaataacaaccagcattggaatagtttcaaccggtagccccagcgtggtgacaataaatatttcaccgaggaaagcgccaccgggaacgccgccgacaataatggcggagagcaccgaaatcagcatggtcaggaagaaagtctcggtggtgaaatccaatcccagtaccgagaagataaagacgattttcagcgcggcaatcattgccacgccgcctttatttaaattaaccaacagcggcagagaaatatctacgatttcagggttaatgcccatcgctttggccgctcgaatagtcactggcagcgatcccaatgaagagcaggtgcctaaggcggtggctgaaggttcaatagcgtgttgccagaaagcccttaccgctttcatgccgccgccaatccaggaataaaagatagagccgaaaacgtaatacagcagcgaggcgataaagaataagccgatggctctggcgaaagtcatcagtaattgtggatcctgactggccatcgtcgcggcgaaataactgcccaaaccaacgggtgccgctttcatgatgattgagacaatcttcataatcacggtatttaagcccaacaaagacagggcaatttgtttaccttgctcgcccgattgcccaatcgcaataccggcgataaccgacataataatcagcgccagaatattggatttagacaataaaccaacaaaatcattagtggtgaccatattcacaaagttcatttcgccgctgccggccttgaactcttgggttaattcaatagtgacgccctgagccggatcaaataaggtcgctagcccaacgattcctgccgccggaatgagcgccataatgatagagactgcaaaaatcagccccattatgcgccccagttttttcaaatccgtcataccggcaatggacgacataacgcttacgctcaccaatggaacgataatcataaacagcaaattcaggaaaattttaccgataggctgtaatttgagagccagagaaggggcataaatacctataaccccaccgagaatcagtgcaaataaaagaataatagaggacttgtagggttccaaacgtttccacataggattttccttggtgtattatttaaatttcatgtgacttcagtcaccttttatttttctttcggcaagcaaatatcttatctgtgattaagctcacctttttatttcttattcttaatatgaataacatatcgctattggtaataaatgattacatttgtagtctacaaatgaaatacgacattgatgccatttactaaaatcactaatgagctgaaggaaagaatgagtaatatcgcatcgctaaaacagctggaaatactggtcaagatcgttgagtgtggtgggctgtctgaagccgcagctcagctgaacatctcgccttctgcggtcagcaagagtctgtctcatctggaatcacagctgggcactatgctgctaaaaagaacgacgcgtagcctgacgttaaccgacgcggggaaatatctttatcatcgggcaactaaattattattagattttgacgaatctcttaatactaccgctggattttataaccacccgcagggtgaattacgcctcacctgttcaattgcctttggttattctcacctcatcactttggttaataaatatcgagagcgttaccccgatgttgagttatatatagatctaaacgataactttgttaatttaaatgagagtaactttgatatcgctattcgcgttgcatcaactccgccagataattattcgttaagaaaactgtcgactatccactgggcttattgcgctagccccacttatctggaaaaaatggggacaccaacttccgtccaacaattatcagaccatcagtgtttgttatatcccggtttgacaccggtattaaaagataccgacgaaagcggcagcgctcatttacttaagttacgctcaccgattcaggcaaatagcagcctggtattgctgaaagcggtgctggaacatcagggtgttgcctatttgccgacttatttactcggcgatgctattcaacgaggtgaaattactcctctggcgcttgatggggaaataacccacgcgactcatggcctgtatgccttgtatttccccagccgttatagcaatcccaaggttcgttcttttattgattatctggtggaaactttgcagcccgtaccggtatgggataattggatcacccgaaggccctgacgttaatgacgaattaaatgaggcaatcaggatgaattgggctggctgcaatcccttttgtcgttctctttatcggcctagcctctgccttagccgccgtttgtgataagccatgactctgctatcatcaacagagttagccgtctttgtaggatattctgtaggataatcatctgcataaggcatgaatttaggccatgaggaatattatgccgaactcattcaaggataatcagacttcatccagcgcagatactgattcgcagcagagcaaaacagcgccgttaagtgcaggaattgaaaacggaaaaaaagctatttccgtattaacccgtcttggcaatcggattaaaacctatcccagtgttgcgcatattattcgcgctaccgatcgctttaacgatcgattaggcagccagtttggcgctgcaatcacttatttttcctttttatcgctcattcccattttgatggtttctttcgccaccgtgggttttgtattggcatctaatccagatttgctggccgagttgatcaataagatcgtgaatagcatcagcgatcccagcctggctgctaccttgaaaaatacggtaaataccgctattcagcagcgtactaccgttggattaaccggtttagccattgcgctttattccggtatcagttggatgggaaatttacgagaagcaattcgcgctcagtccagagacgtttgggagcgtaatccgcaggatctggaaaaattttatgtgcgctacacccgtgattttatttcgcttaccggtttggtgctggcgctgattattactctctctcttacatcaattgccggttctgcgcagtctgtgattgtgaatgcgttagggctgggtgatattgaatggctacgaccggccatgacgctaattgcgctgtctatttccatcgccgcgaactatttattgttcttatggatattctggattttgccgcgtcataaaccaaaaaagaaggccttgctgcggggaactcttattgccgctatcggcttcgaaatcattaaattcattatgaccatgatgcttccgcgtcttgccagctcgccttcgggcgcggctttcggttcggtcatcgggctaatggctttcttctatttcttcgcgcgtttaaccttattttgcgccgcctggatcgccacggcgaaatataaggatgacgaaaccttgcctgaacgccatgcctaagcggctgtcagatgcccgccgtcaacgtgcgagaggtttttctcctatcggcgatgaagcctttgccgcgcgttggaatttaaccctatactgctggctacttaatcgatcatggagggtcagttaatgccacttttatcttatcgtcgatggattgctttgggcgtattggtactgatcgccgccattgcggtgtatgcgctgcaacccaaaatcgggaatccagatgctctgtggcaaattgttagccaacagtgcgttccccatcagcgccagctgaattcccctcaaccttgcgccgaagtgaatactcaggccggttttgcggtgtacaaagaccgtaacggaccgctgcaatacttgttaataccaactgaaaaaattaccggtatcgaaagccccgagttgttatccgcagcaacgcctaactattttgctctggcatggcaagccagggattacatggcgctaaaatacggtcatcctattgataatcaaaatatctctctggcggtgaattcagaattgggccgcagtcaaaatcagctgcatattcatatttcctgcctatcaccgaaagtgaaaaaagcgctggcagatcaaagcgattcgttccgcccaagctggcagccattgccgaaaggattgctcggtcatgattatctggcaaggcaaatcacccccagtgaactccaggaacaaggcgcgttccgcctgctagccagcggcgtacagggcgctgcggaaaatatgggcaaatacggcttagccatgacctctctgcccaacggcgatttcttactattaaccacgaaacgcgatttgaccggcctgaatcttgcctcggtcgagagtatccaggaccacagttgcagcgtgctgcccgtgcctcctcactaaaacttacttctgcttcatgcttttcagcagcggcgtgcattggttttcttcaccttcactaggcgaaatcaatgccaacaacgccgccgctggcgttaaagccacgcccaacacagccgccaccgcaccgcgagcaattaacggcccggtcttcacacccgcgtccggatttttaaacgtgcctttaacgtacagaggcgaacgcaacgtcagaatacgtaaccctttgctttgcgggtcgattgagagatccaaccgttcggtggcgaaattagcattaccggtaatattgatgatggcattttccgtgtcgaagacgaacagccgcggcgtagccagaccgtttcgcatcacgatatccgcagcagcacagttaatttttacttcgtcatcaccgaagagttttgccactatgtagttacccacgttcagccccaataattccatcaggctgcggctgattagcccctgattcagcaatattcgcaggctaccattactggttcccaacagcgccgccaccgagttaccccgagccgtgaaggaagcgtcgccattgagctgccccagactgttacgcatcgactcgacttccggcagcagctgctttaactggaatcgacgcgcgtgaaggtcgatgcgcccttgcatcggatttttattaccattcaggcgtaaagtggcgttgagattgccaccggcaataccgaagcgcagcggatcgagtaacaactcaccgtttttcatcaccacatgagtagaaagatcgctgataggtaaggctttatcccgctcgatacgtttagcggcgtaggtcacatctgcatccataacgttccagctttgggtttcaaaagcctctaccggcagaattttatcggatggctggcgacttttctcaccgcgcccttttttctgttgattggaatcagcgccgattaaaggagccagatcggcaaaacgcagttgattggagacaacctttcctagcagtttgggtcttggctgactggcggtataggtgagatcgccgtgaatatcgctgtcgccgattttaccgttgaatttttgatactgataaaccgcaccgcccgattgacgcaaccgagcaatcaaatacccatcggtggcataaggtggtgtattcggtaaaagtacaccaatcaacggatataagttacccagactatcgccggagaatttcagccgtagattgatatccgccagattgctcggatcattgagcgtaccgacgatagccactcgcgtagagccggagcgcacatctgcctgaatagggaaaggaatatcagcgttagtcagagaaagcatccccccgatttttccgctgccgctcacaggttgcccttggtatttgccttctacctgccagccgaaaatataatccaccgacgtacttctaaccttgctgtccttcacttcacccttgtcgccaatcacttcggaaaaaggaagaggcttgcccaaagggtcgattttcgcccgtagatccgctttcaataccgaatctttaagcgaaatctggccgcgatcgaacacaatatcgctgatattcaccgaccaatcggaagatgcttcacccttagctttgtcgcgattggcgagattaaaggtccagttgtttttaccgttggccaagcgctgcaaattagcatcgggttccgtcagccaaattctgggaatgcgaacctgcttacccaacaatgccagtggagacaaattagcctcaactcgctttagggtcatcatattatccccaggaatatctggcgggttgccgagtaccaaatcttctgcatgaatctgcggccagggaatccaggcacgccaaccgcgatcgtccgttttgcgcgaccagtcaacgcccaattcgccacgaatggcaaagggacgctgcaattcagcactaaccttttggtttattgtgggttttatgcgattccaatcgaacgtaagaacgaaaatcactaaaacagccagcaataccagcacaattccggccacccaaagcagtaccttcccggtttttgtcataatcgctccacaaaatttatcagaagctaaatccggttcggcaataaacaaaacggctatgggtactaccgctcagcctgtcaatgtagaaaaaagagttaatcgatgaggaacgcggacttagacgcttgtattaaccatagttgaggatcaactaacgtccattattattggcctgatgaaaagcagccaatagatataaacgtcaatttatcagacggttaatgatcaaacgactcatcggttttgacgattatttcacccggacgttacccggcgaataacaggggaagtgactgtaaagtatcaaaatgtgcgggtctggaaagatagtaaccttgcgcagcacaggcatcagatcgtttaaccagcgcccattctttgtcagtttccactccttctacaatcacgcctttactgtagcggctcatcaatgttaccagcgtaaagaacagctgctgccctacctcactttgctgtaacagaataaataaatcgcgagctattttgatgtattcatagcgccaactgacaaaagacgagaagttagccacaccgctgccaaaatcatccagccataatcgatcggcctcagcgatttgagcaaacggagtaatacaggcggtatccatatgttcgaccagctcaaaacgcacataaggcatagaatcaataagctgccgcgcttcgggatcgttttgcatctccatcaatgcctgaccgtcgatattgatcgataccaacattgagcgatgggtaaaaataccgtgccattgcttcactaattccaactgttctaacaccacgttcagacgcgcccgaatgctgatagaggagaaataatcctctggtgagagtcgggtttccggcgaggagggatgataaacagccgtcaataattctatcgccagtaacttccctgaagtgcgataaataggttggaaagtatacctacgctgacattgccgccaaaagttgaatcccttattacaatcctgagcggcaagggatggcgcaagtaaatctgatattttgttagttagcatcagttttgtcgccatatgtcggggtatcaggcagtcaaagctcatactatgcttactgccataaagacgctccccaatgagagcgttcttccttctggagatgttatcgactcgttcgaccagaactttatatgtgagccaggcagattctcaaaactgcgaaatcgcctccaactgagcaacgaacgacaaaccggcaaacgtgattgagttaacgctaacattaggataaatggagaaaataatgccatacgtaaatattaaaattacccgtgaaggtgccaccgccgaacaaaagaagcggctgattgccggtgttacgcaactgttagtcgataccttgggcaaaaatccggctaccaccgtcgtggtcattgatgaagttgataccgataactggggtattggcgggaaatgcgtaaccgaactgcgaaaagccccctaattttaacggaacaaacgggaaacctgtcagtttcccgacctaggtcataaaaaatataaaacgccattttaattctattgactcacgcagaaccagcagagagactaagcctatatccctcatatcgagttttctttagaaataggccgctttccatgaccagcaaaaagattgccgttatcggcgaatgcatgattgaactgtcgcaaaaaggtaacgatttgaaccgaggttttggcggcgacacgctaaatactgcggtttatattgcccgtcaggttgacgaagaggcgctggaagtccactacgttactgccttgggcgctgacagcttcagcgaagacatgttggcggcatggcagaaagagaaagttaaaatcgatttgattcagcgtatggatgataagttgccgggcctctattttattgaaaccgacgagaccggtgagcgtactttctattactggcgcaatgatgccgccgcccgtttttggctcacggggccgcaagctgataaaatttgccagaagctggaaaacttcgattatctctacctcagtggtattagcctggctattctggacgcctccagccgccagcgcctgttgaaactactgcaagcctgtcgtaccaatggaggtaaagttatctttgataacaactaccgcccgcgcctgtggcagagcaaagaagaaactcaggaagcctatcgcgctatgctgtcctgtactgacaccgcgtttctgacgctggatgatgaagatatgctgtggggcgagatgacgctggagcaggctatcgatcgcactcaagctttgggcgttaacgaaatcgtgatcaaacgaggtgcagattcctgcattgtctggaatcgggaatccgatagccagcggcccgcggatcaacatgtggtacccgccgtaaccttgccaaaggaaaaagtcgtcgataccaccgcagcgggagattcatttagtgcaggttatctggccgttcgcttaaccggaggcacacctcagcaagccgcagtgcgtggccatttgacggccagtactgtgattcagtatcggggggcgattattcccatcgcggcaatgccaaaagtctaagccaaacgagatgtattgacgggagagatagaaacaatattcgggaccagaaaggccccgaatatctgatttgaacacccggttttactgcgcggtcgaagcttccggcggcgtcccttctggcgtggtgccttcttgcgtcgttccttctgacgcaacgcctggcgtagcttccggtttcacttcttccggcgcagccattggcgtacccgatgtcataatgctgttatagctttcctgcaatgctttcacgctgacttctggctcacctttcggctgaaccagaaccaaagtggtatcttgcgaaagctgttgttttagctcctgattcagattggccaacgttaagccggacaggaaggtttgtcgcagcttctgatattgctcaggtgcgatatccactacaccgctctgctgagaacgcaggcgctgactcatcaacacatcggtatcagtacgggcataagtcgcgaacagcttgcttaactgatcgtttttctgcgccatcagtccatcaaattcagcctgactcagcccattagcacgaatactggctaattcattagcaataaacgtcatgccggaattcagattttccgttggcgtattcagatgaatcgcacactgagcacgttggtattgcacccggcaatcaaagcccagcttcatattcttctgaccgcttttttccaacgcctgctgcatatgccagaacagcgcttctcgcgctagatcactgcgccaatagcggctaagtgcctgggagtcctgtatcggatgccacggggtatcccaaattagcgacaaagtgtcctgcgtcacctgctcgctcatcaggttcaccggctgaggcggtaaaggagccagcatcgcgatagaagacggggtctgtcgcttcccttccaacgaagagaaggttttactgatttgcgccaccaaactacggctatcgacattgcccacgacatacagcgtcatcgcatctggcgtgtaccactgtttgtagaattgcttcagtttttccgcatcaaccggaccatttaccggctgcccaggatcgtgacccagcagtgaagacccttttaggcgatagcgccaccaagtgtcctgtacattttgcgggaaagtagcaatgggatcattaggaagattcagcgcagcattcaccgtttgctcgctgatggccagcttaccgctggtatcagatagccaagccaaagcctctttaatcaaatcagggcgattgtttggcaggctcaggctgtatagcgtgaaatcataagaagtaatcgccggtggtaaagggcgctcgttatcgaccccttgctgccacagcgattggagttgtgccggagtaaagctctggctgcgaataagcgccaaacgaggtaacagatgggcaaagccaacctgctgtgcgctttccgacagagatccggtattgaccaccagacgcatctctactctatcacttgggcgctgcggcgttgccagcagctgccatgtaaacccgttttctaactttccctgctgccaggcaggatcgggttgtagtgcttcagcttgcacattgccgctggccgccgccaacaacaatccaccaactataagacgaattctggtgccctgcatgtgaacccctacttaataactatccaatttaaaactatccaactttcaaagaaattacacgctcaaaacagcccaatgatacgaaactcatcggcgtgtgcttatgttggataaaaaaactacgctcatcacagttatgaccgcggaaaaagcaagtgtaccattctgttagaccgcatgcttttgccgatatcacccatcactgcgaaaaataatgttcaacgggcaatacgagcgaaaaatggtagtgattgactatgcagaaaccaccggtaacgatgagctaccggtggctgattgactaatctggtgacctaaaagaatcaggaagaggatatctgcccttctgatttacctgccggactcttattcgacaatgtcgcctgcagttgatcgttatccaactggttacaccatttcgcgaccacaatggtcgctacgccgttaccgaccagattggtcagcgcccgcgcctcagacataaagcggtcaatacccagaatcagtgccaaaccggccaatggtaaatgtccaacagcggagatagtcgcagccagaacgataaagccgctaccggtcacgccagctgcgcctttagaggacagcagcaataccaccagcagcgtcacctgatgcatgatatccatgtgggtattggttgcctgagcaataaataccgccgccatggtgaggtaaatggaagtcccatcgaggttaaatgaataacctgtcggaataaccaaacccactacggattttttacagcccgcacgttccattttctccagcatccgcggtaatacggattctgaggaagaggttcccagaacaatcagtaattcttctttgatatagcgaataaatttgaagatattgaagccgttagcgcgcgcaatggagcctagcaccaccaccacaaacaaaatacaggtagcgtagaagcagacaatcaattggcccagttgcaacaacgtacccacgccatatttaccaatagtaaacgccatcgcaccgaaagcacccagcggagccaggcgcataatcatattgatgataccgaagattacgcgggagaaactttcaattacgttaaagataagctgacctttttcgcctaaacgatgtaaggcaaaaccaaacagtacggcaaacagcaagacttgcagaatattaccgctggcaaaggcgccaatcacgcttccgggaataatatccaacaggaatggaattattccttgctgagaagcttgctccgcgtacatggcaaccgctttagcatccaaagaggcaggatcgatattcatccctgctccaggctgcaccacgttcacaataaccaggccgatcaacagtgcaatcgtacttacaatttcaaagtaaagcagagcaatggcacctgttcgcccgaccgctttcatactttccattccggcaataccggtcacgacggtacaaaaaataaccggagcaataatcattttaattaatttaacaaatccatcgcccagaggtttcatctgagcaccgatgtcaggataaaaatggcctaataggatacctaacgtgattgccgttaatacctgaaagtaaaggcttttaaagatgctggttttcatatcaatgtccttttggagaatgcacggcaatgtgtcgttatggtctccgcaaatgaaagggacgcttcatttttctatccgcgctagcgcgaaaaataacaccccaataacaatatgtaagtcatttattatcgtaaattgtcccattaacacgaaactaagaactgaaacgcttcaagaaaaggtaactggagtggagcagtgaaatattctttgctaccgagccggtctgagagacctgataagggaaaggataaataagagaaggtggggatattgcgaaccaacgttgaccggacaaacccgatcaacgtggcaggaaactggcctcaaactcttcgcgcggcaccggacgggagaacaggaaaccctgcccgctcgtcacaccgtggtctaacaaccattgacgctgagcttcattttctacgccttcggccatcacgcgcagtttgagcacattggagatactgccgataattcgcgccatcgcatcatcctgcggtagcgtgtggacgaaacttttatcgatcttaatcatgtcgatgggcagacattttaggcgattgagataatgcaggctggaataacccataccgaaatcatccattgcgatggaaacgccgagttcatgcagctcacgcaacagtagcaacgcctcatccagatcgggaatacgggcagtttcggtgatttccagcattaactggctggcatcaattttgtaatgactgaggatagttttgaggtgcggtaaaaacgtctcatgctgcacctgcaaaccggaaatattcaccgccaagggcaatttaatgccttgtcgctgccagtctgccagtatccggcaggactcttccaatacccaattacccagcggcaccataatgcctttttcttccaccagcggaagaaaatccaccggcgagaggtaagtaccatcggcctgattccagcgcagcaacgcctccgcgcctatgactttttcattacgcatgtcccactgcggctgtaggtgcaatataaaatcacgtttctcaatggctcgaagaatgtcattttcgtaagtcagatgcttttgcgttttttccgacaaatgctcttcgtaatagagaatctgatttttacccttatggtgggctgccaccatggcagagctagcactgcgcattaaatcttcagcgctttcatgctgattaagatattgcacgatgccaatactggctttcggacgcaactgcatgttttcaaaggtcagaggagcggtaatctgcgccataatccgccgggcaagctgcatcgccgggaaaggtcgcgatatctcttttgccatgacggcaaactcggttttactcaaatggcccagcaagcagttctggtcaatgcactgctcaagctcctgcactatggtcagcaacagctgctcatgctgatgttccgtcatgacgccggacgcttcatgcagcgtttctatgccaataaccaagaggtgaaatttttctggtcgaacaggggaatcaatgtgctcattcaacatggctaaaaacagcgtgcgattcggcaattcagtcaccgggtggcggctgctgatacggctcatttccgcataggctttcgctaacaaatgctggttacgattataatttcgcgccaatacccctaattcatcatcaagatgacgagcgggcatggaaagctgatgatctaacacctgatcctgagagatattctccagttcacgagccattgagcgcaatggatgcacgattaaccggttaatacaccatgtaattgaaacggaaagaatcaatgctaacaacagataggttgaaagcatggtggataaggtattaagaataaattgataaatacggtaagaatcagcctgtaacaccagataagccaggggcttagggttggcggggactctttctaatgaatagagcggaacggtaatttgcaccggcagattaaatacccggttaacccaattgggtaccggctgctctggcttaaaattagcgtgtaatacctgtagctcattaggcaacaccacatctgcccgactcaaaatcccaatcggcaatgtgctctccagcacacgtttagcacctggaatatcgacgctgagtatggccgaagaaagggggtttttaacggaatacgcgatactctccaactgcttggcgtagtcatctttgcgctgctgcacaaaatggaacagttgaatgacaataaagatacaaatcgtcaccagcgccacaccggacaccgttgccatttgctttatcgttaacgaatgcctaacccgcaaactttttctccgcctatcgtacccgtaaaaaagcggctttatcatcaagccaaccgccaactcagtctgagtatactcgatcgtctgccgattttatcttgcgagactaaactgatgggcaagaatatcgcgggttttggcgttttcctatcaggatcctgctttttatagcgtaaaaatcacttttagagcagtttttcaccaggtaaaccgccccgaaagattatttaaaatcggcgtaaggtaccaacggctgcggcggcatatccagatcgccctgccagcccgccattgagtatcgcagatacaccagtgcatgacttggggtgtagtctttcgcctgctgaatatcaataccggcacccagcgtccagtgagaactgagtcgccgctctatcagcgctcgcagggtataacccacgccgctgctgctgtcgccgaactcggttgcgttgcgatctctgatttcctgcaagcttggcgacaataaacctttcagcggataacgcggctcatcgctggttgccgaatgagaaagagaaatcgagccacccagttcccatgaccagttttccgtgcgctggcgataattcaccggaatagccacagacaggtatttttgcggactgtaatagcccccttgccccaaggtgtagccgctgaggtctttttgatagtgccaccacattccgttcagacccacggaaaggcggcggttatcttcgttaatcagcttgtagtaatagccggtcatcaaacgcaggcgttggttatccgcaacgttttgccccgtcagataatggtaactgacatcgctccagactccgtgcgcttcgccacgatcgtaactggtacccaagctgacgccgttggcgcgaacgccgccccaggtcacattggtattgggatcttttgttccggcaaacgccagtaatgaactggaaatcgggcggcgagatgccgttgctgtccagccaatatggttccaatcgctgctataactgacgccaccgaccacatcaaccacatcaaaacccatcggagtggtaccgatatccgtttcccagctatcgttttgccaaccggcggcaatactggtaccggttgcccgctggcgcatgttagctacacaaggattttcaacgtcatagcaggtgccagccttatagcgttcattggcattgaaagtacctgcatccatttgaatggtatcagcacggaagaacgcccgtccatcagacagcggcgtatccacctgtaacatggtgttgtgggcattcagatcggaaataccttctgttccgctggaacgaacataatcatgatccagcgtgacccgcgtatcttgttgacgatacaaatcggcggcatcggaacggataccgcgtttcagccagtcatccgtagcctgattgcgcgtaagaagcgtgtagctgtcgttatccgctggcagcgttggcgtgatgccgctaccaaccatggcccgcttataatcctcctgcgccaactgcggatcgcccagtttttgcgaaagacgcgccgaatcacggaacactaacgcgttagcctgagatgggccttctttctcagcctgtggtttaagctgctggaagatggccgatgccttttgtggatcgcccacgccgctccaggcattcgctacacgccgctgggtatttagtgttgcatctttcgccaccagagaatcgccttgcagaagctggcgcgcatcgtcggttttcccctgagccaccagcgcttcgatttctcccaaacgagcgtctggattattgggttcacgaacacgaataccgcgatagccggctagcgcctgcgcgtagtcgttacgctccagcgcccagtccgccagcgtcatatcaatacgcgtactcggcggctgctgacgtaataaagctatcgccgacggttcatccccgccagtacgtagccgttgggcattttccaatactcgttcgaattgaagtcgttgatccaattcgcgaatatcatcattccattggcccttaggaagcgtggccaggtggctaagtgcttgattgtctcgctcggtgctagaaagatatagcgcataagcataaacctgctggggatcggccggtttgcgtaccgccaacccggcgaattccctgtcagcctgctgcggctgcccgctttgatacagcgcctgcgccaaacgataagtcagccagacatcgtccggcgccattttctgcgcctgtcggtatttttccgctgcctgatgccactgttgctgcgccgcgagttgctcggcctgctgtttcagcatatccagcttcagcccgttcagcgtgtcgcgcattttcgcctgttgtcccgccggtaaaccgctgaggtaagccatagctctttccggagactgacgctggtagatatttgctagaccgcgcaccgcactgctgttaccgggttccagacgcaacgcctgctggtaaagctgttcagcggttttatcatcatggcgcgctacggcaacgtcggctaaacccagtaccgcgtagctgtcgctgctattaagctggcgcgcctgctgatatttctgctgtgccaaatcagggttacccgctttcagggctttatctccctcatccgcgagtaaccaataatggttggttttaatcaggctggtccatttatcgctgttcagcccagttttatcgactttctgcgcctgttcaaacaaactagcagctttttgccgatctccggctcgcgcataggcgatacctaatgcgcccaaaacgtcggcgtcattgggggcagtagaaagcgcctgtttcagatcaggaatggcattgcggctctcgccactatccactcgggacaatccggccaagcgtgcctgatagctgggatcggacaacattttttcctgccgagccaattcgatacgcgctttatcacccgcggtaccaccggcgaaaacatcgagaaaacgattcaacagagaaatactctgcgggctaacaggcaacgctttgatttgatccatccacaaatcggcagccggtgagttacccgcaggatccgcagccattttttggagtaaagcataggcctgatcatcctgtttttgactaaacagcattctggctaatgccatacgcagcggaatattaccggggaactgttgatccaaacgctgcaactgcttcatcgccgtctgctcttgccccggcaaacgtgccaccagccgccagtattccaccgctaaatccagcgttggcagctcacctttcagtagcaggtcatattggactttcgcttcctgaacgcggccagcggtggccagcaatcgcgcctgctgtaatttctgcatgacttcgggctgcgtaagcgccagcgccatttttgactggcgataaatatcggaattcggggcaagctgttgcaacctatccagctgttttttcgcctcttccgtgttcccttggcgcagtgcctgacgtattcccgccgcagcaacttccgggttatttggatccatcaggctgaggcgatacaaggattggcgcaccagttcatctttatgggtagcttcccccagacgaacctgttccagaagaaattgagcgggagcaacggcctctgcgcctttagcctggggcaataacgccagactaaaaggaaatacgctcagccagtttaatttgaagttacgcattgactgccccaagagggtaaaagctcaccctgccgattaaaacgataacgattctgtgcccatccctgaccataaagcgtcaaaacggaactgtaataagcgtcggagccgggaggtgattcttccacccgctgcgtctgttttttcaatatttgtgagccacttgccgttgcgctggcgcttaacaacggcaatagggcggccgagaaacctacaggcccgttgcccgtcgttttgccactggcggtatcggttttctctggtggaagcccttgctgctgcgtcacttcaaccatcggctgaaaacgttcgattagcgccgctttctgtgggctgtcgtccgctaacataccggcccagagataaactcgaatggcatcgtagctgccgatattgggtttcactttatccggctgccagccgttggttttgcgccacaccacccaatccggcgagaatcctttcggtgctgtttccagccagagtcgctgatttaccgactccattgcctgccacggcccttttttcatactggcaaaccgcgccaataactgtggcggctgatagctgggattgacgcgccaggtatcttcgtcaacaaaacccacttttcccggtaatagcattcggcctaaacccggaatatgcgccacctcttctttggcaatccgctgcaatagcagagtccccattgtggtgtagcggcgactattccacagccgtccggcctccagcagatcgtaggcaatccacagatccgcatcggaagcggaattgctatccagcacgccccaggttttatcctttttctgcccccacgaccaagcgggcaggcgagcggttaaatctcccgccgccagattgttttccgtccaatccaacagcaggttaaaagccgcgcgatcgttagctaccagcgcaaaaaatagcgcatagctttggccttccgaagtggtcagcatttcggggacgctagcatcaataacgcgccccccttggcttatatagtgttgtttgaactgctgccatgcgggccaatgacattctgccgctgttgccccgctataggccaacagcaacaggctgcatatcagtcggttaaacatcacaaccataaaacctagtccctctcatctggagataaacgacggcggctcactgcgcgcagaacccgccacaacatcacggcaatcagcacgacaaccagcaccgcaaccgcagccagcagcactggatgggtggataaggcgtaccagatgcgttcccaccacggcagatggccgacgctgtaggtatcgccaacccgcagactgttaacgccggaatcacgaatcaccgccacggaaccgaacacggccgcacgtttgccagtatccagcaaagcatcattcagcaattcataaccctgcgggctatcagccagtaatgcgacgatgctgcgttgatcgtaataaggagattgaaccccgataatcgccgacatggcgccttcggagctgatggccgttttactatcaggcaccgcatccgttggatcgatagttgccgccgcgacaatcgactggcgattcggcattttcacccagctttgagtcgcatcaaccaacaggttgattttcttatcatcccgcagttctggcggaatagagccaatcatcagaatatcggcatctttgtccttcgcctggctccaatcatcggtaatgctgatgcccaccgcaggataaccgacctgcgcaccgatattccccaccgtattcaacagtgcggtaacctgagcgggctgcggcttaggctgtaccaaaaccaaggtttgggataaatcggccatacggctgaatgggaagcctgcattggcaaatgagcgcagatccggcatttccataaagtggcgataaccggagaaatcgatcgtggagttttcgtcgatcaccacatggttaggcgaggtggtgaaggtttcgcagcgccctccggcattgctggcaataagcgtgctgtaatcgaaatcaaagcgcagttgattggtcatacccaatttcagcgccgggatcgtcaccgctcgcgtgccgtcttgtagaccctgaatcaatggtaaacgcagaattttggcgctttcctgacgattaggcactagcggataatcggtaaagaactgatcattcaggctgacgcttaagcgtgagccgtctttcaggatcggtgccgtataacgatatttcagctgcatatcgataccggcactgcgcagcaagaacagatccggcggcagattcatcgaaagcaagatcggtgacggcatcaacccactactttgtaactgttcaggatattgctgtagctcggcaaaggtcatgggtctttcggtacgcacccagtttggcgcatcgtaaggcacacgcggagccagctgctcaactttgtctacggtcacattttgaccgcggaacagaatgttaccttgagcaatacccgttgccgccgcaatcagatccttgtcatcccgcccgagaaccagcagtagcttcacgtaaggattatccgggtgactgatcatttccaccgttggcgcattcaccgccggataatctttcagaaaatcaggccgtttgtcattggtggcaaaaatcaccccgtgacgatcgggaatctgattgaaaactgcagggaagtgttgaccgcgccactgagcttgctcaccaaaccaggaagccagaattgcggccgctttttgctgagccacatcaggagccgctgcaaaaacaattggcaatgttagcgggcggttatctcgcgcatcgaagaaaggctcagggaaatgagacaaatcattcttcagcggcagtgactgatagcgtaagtccagcgagctattcttaccgatatccagccacagcgtactgtttgccggattttcacagtcattctgataatgcccgataaagaccagccgcagacggttgaagtcggtaatgtaacgaggatcgatggatagctggatgcgattcggtttacccaattgttcgcgggtaatagccgtcacgttcattagctcatcgttcaggtagactttgagctgcgattcgatcggcgttagcgacggcgacggggtaaactccagattcagagttgcctgtgtcaccacttcatcgctacgtacgccaaattccaactgaccgtccggcttaacgccccctagggagaaattgcccggcggcggagccaatttggcaaaaggatgcaccacatccctcaccggcgcggcctgcggtatagcactatccgcaggcgtaacggccaacgaaggatcgactgccgcgggagaggccaacgtcggctgttcggacgccgtaacggttggggtcgtttcggcatgagacagtgtcgttagccccaaagccattgctgtaaaccaggttatttttctaatcatcatatcatcatcaatgttgagccactgtctggtcctgactccgcagagtctgaccctgtcctacgccatgaggaacaaatgacgctacccacgcaagcaaagaggtaaatccaaccagtacattacgaataagcggcggcgcgtaattcgccatacgaacataaccccggaaacccaacgccagaacatcgcgcagactttcgataggtttatcttcagggaaactgtcctgccacagcgcccaggtatcggcgcgggcaaaagtacactggataaagtcgatgtgctgagccacgctcagttcgtcaatacgcatcccgacttttctgccaaatgcccgagtgaccttgcaggggaagatgtattcttgctgaccgcgcttcagtagcaaattgaccgcctcgccgtcctgtaatagcccttcgttacgcatttcaatccctacgccaccgtcggaatagtcacgcaatgtacaggcaaacaggtgaccgtcttttcgctcaaccgccgcgggcatagcaatttccacccggtgcgcctgacgaacctgtttagcttcaaccgccacggccacggcaccacccagaatcgtcatgttgtaaataacccacaccaaactgattatcaccgtcatgatttcgttggtcggcccattccccaaacgccacaacccggcaatcaatcccgccagattgagcagcaccagcgcgatataaggacgggtgataacccaatccacatgttgctcttctatcaaaccgcctttggccgttacgttaaacttccctttatgcggattcagtagcgcgaccgtggttggacgggcgatataccacgccaatacggtttcgtagatttcactccagaacgagtggcgatatttaccctgcaagcgggagttggtcaggctggcgtgaatcatgtgtggcaagacgtacaacgcaatcgccagcgccggagcaaaaatgatgtacgcatgcatcagcaagaaggctagcggtgcggttaggaagatcagccgcggaataccggccaaaaagtgcagcatggcgttggcataacacaaccgctggacaaacttcagccccttgccaaacaacgggttatccagccggaagatctgcaccatgcctcgcgcccaacgaatacgctggccgatatgcgccgagaggttttccgtcgccagccccgccgcctgtggaatacgaatataagccgaagtatagcccttacggtgaagtcgcaatgaggtgtgggcatcttcggtgacggtttcgacggcaatgccgcccacatcatccagcgcgctgcggcgcaaaacggcgcaagaaccgcagaagaaggtcgcgtcccacatgtcattcccgtcctgcaccaaaccgtagaacagcgtgccttcgtttggcgtctgacggaaacgtccaaggttgcgttcaaaaggatccggcgagaagaaatggtgcggcgtctgcaacatacccaactttggatctttgtagaaccagcccagcgttagctgtaggaaagagcgggttggcacatggtcgcagtcgaaaatcgccacaaactcgcctttagcctgcttcaacgcatggttgatattaccggccttggcgtgctcgtgggttgggcgagcgatataattcacgccaacctgatcggcaaaggctttaaattccggtcgattaccatcatccagaatatagatattcaccttatccttcggccaatctatgcctaacgccgcgtaaattgtgggttttacaacacccagatcttcgttgtaagtcggcaccataagatcgatggtcggccaggtcgaaatatcctccggcatcggtaccggctggcgattaagcggccagatagtttggaagtaacccagaatcaacactacccaagcgtaggtttctgccaatagcagcagtaaaccgcagaccaggctcaccgggtcgtcccaatttagcgtttcggtatagcgccaccacagataacggcaggaaacggtaagcgatagcacaatcagcattagggtaggcaaacgccccggaatacgccgaaccaccatcgcgatcgcccatagcagcagaacaaacacaaactgcgccatcaaaccaaaaggttgggaaatacaaatcagcgccagaattccggcaaaaatacccaatgagataaacagaatgcgtcgggtacgctgctgcaaacgaccgacccacgccactaacgcctgctcccagcgactttttttgactttttccggcaatatattcagccaggagcgatagctcagctttttggtgcgaacccagcccggagccatatcgacgggcttcggttttttctcccgcggttgagacgaacgcgtcaacaccagccacaggccttgcagcaaataacgcaccgcatctgccaagcgcggacggcgattagcaatatgcgggaaccagtaacgacgattctgaattacattttgccagctcggagattcaagacgcaaaaatagccaccccagcgccaccgcgaacgtggtcaaaaaagcggtcagaatcgtgcagccctggtccagatagtggttatatcggtgctgtagcctctgatagaccggaggcataaaaagtccccgaattaacaggctcatagatttttttccgcgccgtgaatcagacaccaatttgccagcgtattgatttcttccgcagccagactttgcggcgcatattcacccaacggctgcttcgccgctaacgcttccgcaacggcttcatcacgatgaataaatagcggcaataaattgcgcaaactttgtagccacaattgatgcatatcttgctgtaagtggctggcagaagagaattgattcaataggaaatgacagccaaccggcagcgcctgttggtgcaaacgagcatgaatcgcagcatcggcggcgatcagcaacagcacgtgatccgccaacgccagcgcttgctgagtgagcgggctatctcctgcgggaacatccagcaaaatccagcggtgatcgccagctgcctctaggtcagccagcttttcctgccagtcgaacgaagctaaagaaccggacaaatggcgctgctcattcatattgagctggccaaaaggcaggaaatccagcaaaggcatataacgcatggcttgctgctgccagcgattaccatccattgccgcccgcgcccagccgttcgcctgttcgtaaggcatattaaaatggagacgtaataaattatcagacgagaaatcaatgaccagcaccgattcctcaagctgttgtaatgcccaagcgagtgcagccgtaatggatgtcgcaccaacaccgcctcttagcccttgcaccgcaatcactggcataagctatttgctccccgagttttgcgccaattcggctaataatggccagcgcgccatcatttgcgccatacgttcctgacggacaatatcgatataacttaatttgggtaatgcgaatgctcggcttaatgctagtagatcgtcctgaacctcgggagatgaattcacataaaaccgattgattgaagtattcattctgctgcccttgaaaaataggctagtgtaataaagtattttgattattagagtatactttgcctaataagataagtcttaatttaatatcctagtacagagttggttaatgtgagatgcgatgatacaattaaagcatagcatttctttttacattgacctgtagaacttcaacaaaattagaagcataaaaatctatgttgagaacattctcgttaggtattgataaaatttgggatgaattagccgttgtgcaggcttcaggtctctattggatcaatatagaccgcgaaagtgacgctaatctattctgccaacagataattagagaccagcccaaagatacccgctcggcattgatttgttctggccaaaaaccctcgaatttactagaaaatattgtcggctacgggccggaaaaactccctttatttactctgccggaaaaaaaagccgccgttaaaaatctcgtcaatgatttgatgcgctcattaagaccacagcgacgtttttttattttattggcccatgccagcttatggcaaacatttacaacggaagaaattcagcgctgggtaaaggaattaaataactggctggaaaaatatcaggccacattagtgattctgagtcatggcagcggcgtcagtaaacttaaaacgcaattagttaaccaacatcgagcattgcaaggacttgccagcctgcaatggcagcacgatcacgcccaatatatggtttcctggtggagcaccctcagcggcgttaccgcaaaccaattggtaaaattgcagccaagcccggaaggctggcagatggcggaagagaaagaacagcagccattggcgcaatctcgtaacgacgagtatatctatttggctgaagccagcgtgctggaaggcgctccgccgctatctaccagctggcaactgtttgaaaacaatcttttattgtctgagaaagcctttaatgctcacgcagcaacgctgattttttcgcttcaccaaagcgatcaaatagatgaactggcgcaccagatacacagcctgcgccgccaccgcggcaatgcgttaaaaatagtggtgcgggaaatggattccagtctgcgttatagcgatgagcgcctgttactcgcctgtggcgtcaatctgattgtgccacatgtcgctccgctatcccgctttctaaccatgatcgaaggtattcagggccagcgtttttctcgtcatatacctgaagatattaataatttactggcttctctgcgcccattgcagctaaagggctatctctcaccggagcaattctgccagtcggtgctagccttgatgagtaacaccctattgccagaagacggcaaaggcgtgctagtagcattacgcccggttcccggtttatcggcgcgtcaggcgctgactctgtgccatatgcgtcgctttggcgacatcgtcacgttggctggcgatcggctggtcgtattcttatccacgtgcagaatcaatgatctggatactgccctgaactttattttccaccttccggtgaatgaaaccttcactaatcagctggtgtggcatcaggatcaggaaatcatctctgaaatcaataagatgaacaatccggactatttacaaaatgtcggagaaaataaaatccataaactgaacaaaactcagcagaaattaacgccgtcagcgcgcagaacccccgtagctttgacgctgaatctgggtagccgcaaggagaacgtttaatgaatctcagcgatatttttcaggttatcttactggcagccatcgtctttttccctttgggttattttgctcgcggccgcctgcccgcatggtgggcgaagaaacaacacttttttctctcagcacgctatctgaaatcagaagggatctggttgcgtgacggctcttccttacatattaagaaataaccatgaacctgaaaaaaaatgcgcaagaatcgcaggcgccatggcgttattggcgcggcctgggcggctggaactactattttctgctaaaatttgccctactctggtttggctaccttaactttcatccattagccaacctggtattcgtcgcttatctggttttccctattccttctgagcggctacatcgtttgcgccattgggtcggtattcctatcggtctggggcttttctactacgatacttggctgccgggcatcaatagtattttcagccatggctcgcaggttgccgggtttagtttcaactatttcatagagttagttgaacgcttcatcaactggcgcatgatcggcgcagccttcgtgatgctggttggttatctgttcatttcccagtggattcgcgtcaccgtgtttatcgtagcggcaatgatcgggctaaacgtgttgaccatcgctggccctgcgttttcgctgctgccgactaccacaacagccgctgataccacggcgtcctcgagtcagaccaatgggtcgggcgccacgaccagtgcgcaacccgcggctgatgcgccgccaaccagcgcaaacctgacggcgtacttaaacagtttctacgaacaggaaaaaggtcgcatcactcaattcccgactacgctgccagctgatgctcaaccatttgatttactggtaattaatatctgttccctatcttggtcagatatagaagccattcagttggaaaagcatccgctgtggagcaagttcgatttagtgttccagaacttcaactcggccaccgcctatagcggcccggcatccattcgcttgttgcgcgccagttgcggccaagaatcccatcacgacctgtatcaacccgccgagcagcagtgctatctgtttgataatttagccaaactgggcttcagctctcaattagttatggatcactccggcgcattcggcaactatctgcaaaatctgagagaagatgccaatatgcgcgcgccgctgatgtctcagactggtattagcaaccaattgatttccttcgacaatgaaccggtttacaacggtttagagctactgaaccgctggctggagcagcaaaagaaccaggcaggagatgcgcgtagcgcgactttcgtcaatattgtgccgctacacgatggcaaccgttttacgggaacaagtaaaaccgccgattacaaagccagagcgcaaaccttgttcgatcaactagatagcttcctgaatgagttagaaaaatctggccgcaaggtaatggtcgtggtggttcctgagcacggcgcagcgctgatcggagataaaatgcagatgtccggcctgcgtgatatcccaagcccgagcattactcacattcctgttggcgtgaagctgatcggtatgaaagcaccacagccaactagcccgctggaaatcaaagcgccaagcagctatctggcaatttcagagctggtttctcgcgtcgtggacggcaaaatatttaccgcaccgagtgtagattggcagacactggttaaaggattaccggaaaccgccatcgtttcagagaatgataatgcgattgttatgcaatatcagggtaaaagttacattcgtctgaacggtggagattgggtgccgtacccgcaataaatctgatgcggtatacaacctaaaaggggcgtaataatacgtcccttttttatttcgtctggacgaataatctatattccctgattagcattacgctaacaaagataaatttacccatttattaatcaatgtcagactattgaagtgaataaatatcctaatcaagtgaatatgccagatgtgaataaatttataatttatatcctcaattccttgatgtttattgacgacagacaataaaactcatttgcttatagagttattcatcttttatcaattctttatttgtttttgttataaaaaaacgccggcagcaacatcaccggcgttgttattaacttcctcagtccatattaaccggccgcttcggcttcatcctgctcgatagcaaaacacgccaccatttgatcgccatactgtttaagctgcggctgtaattggctacaggtgccaaaggcccgacggcagcgagcattaaacgcacagcccggaggcggattcatcgggctgggtagctcgccagttagcttgatacgttcccggcgcatatccggattcagccgtggcgtagccgatagcagcgcctgcgtatagggatgacgcggattattaaagatggcctctttgctgcctttttccacgcagcgaccgagatacatcaccatcacttcatccgcaatatgttcaactaccgacaggtcatgggagataaagacataagacagccccatttcctgctgtaaatccatcatcaggttcaatacctgcgcccgcaccgacacatccagagcagacaccggctcatcggcaataaccacatccggattcaacatcaaccctctggcaatcgcaatacgctggcgctggccaccggaaaacatatgaggatagcgatcgtaatgctcagttttcaggccaactttcgccatcattgccaacgttttctcacggcgttccttactgctcaacgtcgtgttgatttgcaaaggctcttcgagaatctgccccacttttttacgcggattaagcgagccataagggttttggaaaacgatctgaatcttctggcgccgtagtttctctgcgctttcatccggcttcagcaaatcctgcccttggtaatacagctcaccgccggtaggtatttcgatcatggtcagcaaacggcctagcgtcgatttaccacagccagattcaccaactaccgccaacgttttgccgcgttccaaagtgaaggagacaccgtccagcgcttttaccaagcgttccggagcaaaaaagcctttcttcactggatagtattttttcaggtcaatcgcctgcaagagcggcttggccgcctgggattcaggcttcatttcagtttcattgtggttcatagggtcggcctccccgcatcatccaacggtgtatggcatttaacctgacgtcccggcgggccgagcagttccggttcttcgctgcgacagcgttcgttggcatatgggcaacgaggattgagcaaacagccgtcgggacggtcatatttacccggcaccacgcccggcaatgatgctaaccgtgctttatcctgcgcaaattccggcaatgcacgcagcaatgcctgagtgtaaggatggcgcggcgcacggaagatttccgaggctttaccggtttccactacctgcccggcatacatcacaataatatagtgcgccgcctcggctaccagtgccagatcgtgagtgatcagcaacagagccatattttcctgctgctgcaactccagcaatagttcgatgatctgcgcctgaatagtcacatccagcgcggtagttggctcatcggcaatcagcagtttagggcgacaggcaatcgccatggcgatcatcacccgctggctcatcccgccggaaagctgatgaggataaacatccagacgtgaagccggatcgggaatacccaccagcgtgagtaaatctactgctcgctgatgccgagtacgacgattgccgccctgatgcaccttcagcgcttccataatctggtagcccacggtgtaacacggattcaggctggtcatcgggtcttggaaaatcatcgccacttctgagccaaccagttggcggcgttcgttttccgaaattttcgtcagatcgcgaccgttaaactccagtttgtcggccatgactttgccggggtagtcaatcaaccccataatcgccagagaactgaccgacttaccggaaccggactcacccacgatacccacaacctgaccttgctcaatgctatagctgatacggtctacggctttaaacggcgctttttcatcaccaaaatgcaccgacaatttatctacttttaaaagtgccatctctctctacctctactgcttgagtttggggtcgagagcatcacgcaggccgtcccccatcaggttaaacgccagaaccgtcagcagaattgccacgccggggaaggtcaccacccaccaggcactctgcgcgaactgcaacacgtcggagagcatggtgccccactccggcgttggtggttgcgcgcccatgcccagaaagccgagtgctgccatatccagaatggcgttagagaaaccgagagaggcttgtacgatcaaaggtgccaggcaatttggcaagatattgataaacatctgacgcagtgcgccagcgccggcaacgcgggaggcggtcacatagtcgcgattgacctccaccagcaccgccgcgcgagtcagacgcacatagtgcggcagtgccacaaaagtcagcgccagagaggcattcacgattgacggcccaaataccgccaccagcaccaaagccagcaacaggctcggcagtgccagcatgatatcgacgagacgcatgataatggcgtcaactacgccgccaaaatagcccgccaataaacctaaaatcacgcccatcaccagcgatagcgtaacgaccaggcagccaaccaacagggataaacgtgcgccatacatcaggcgggatagcacatcacgccctacgtcatcggtgccaagaatgaatttccaactgcccccttcctgccacaccggcggtttcagcaaagcatcgcgaaactgttctgccggcagatgcggcgccaaccagccagcgccaatcgcgaccaccagcatgataatgatatagaacaggccggcaacggcccctttgttgcgcttgaaatagtgccaaaactcctgcatcggggtcattggcttcggcgcactttttactgctgactcggtaagttgagacattctgcgccccttatttcttatggcgaatacgcgggttaaccacgccgtagagcacatctaccagcaggttaacaacaataatcatggtcgcgaccagcaatacaccgccctgcaccactggataatcgcggcgttgcaatgcatctatcagccaacgccccagccccggccaggagaaaatggtttcggtcagaatcgctccagccagcagagtgccaacctgtaagccaatgacggtgacaaccggcagcaaagcgttacgcagggcatgtaccacaatcacgcgcatccggctcaatcccttggcgcgcgcggtacgaatgtaatcttcccccagcacctccaacatggatgagcgggtcattcgcacaataaccgccaacggaatagtgcccagcacgatggcaggcaggatcatatgcatcacggcgtctttgaaatcgccttcttcaccccaaatcagggtatctatcagcataaaaccggtgagaggatgactgtcgtcgaggaaaatagtatcgctgactcgcccggataccggcgtcagattgagctgcaccgaaaccagcataatcagcatgatgccccaccagaaaatcggcatcgaataacccgtcagggaaatacccacggcggtatgatcgaatatcgaaccccgtttgactgcggccaaaacgccaaccggaatcccgacgctgatggcaaatagcatcgcgcacaaccccagttctagcgtagctttaaagcgcggcacgaattcttcccatacggaaatacggcttttaagggaaatccccaaatcgccgtgcaacacgccgttaacgtaatggaagtattgttgatagagaggcttgtccagccccatttctgccatgatttgcgcatgacgttctgcggatataccgcgctccccagccatgatggtcaccggatcgccggggatcatatggacaaaagcaaaggtcagcaatgttatgccgataaacgttgggatcactaatcccaaacgtcggagtatgaactgaaacatatcccgagctctctgtgtaaagtgcccaacagctcataggccgtcaggcttattaaaaacccggccccggagccatccgcacaggctctgctctcagggatgggtttaaggctcacatctaaaacgatgtcttaactatctggaatgccagacaaacgagggcaccttagcgccctcattcatgaaccgcattgacaggttatttatcgatatccacttgctggaagtagtggccacccaatggatcgacgatgtagttttttacttctttacgcacaggttcgtacacggtggagtgagccacaatcagcgccggagcctgatcgtgcataatcacctgagcctgtttgtacagttcggcacgtttagcctgatcggattcagcacgcgcaggttggattacgtcttcaaacggcttgtaacaccatttggagtagttggaaccttgcttggccgcatcacagctaaacagcgtagcgaagaaattgtccggatccccattgtccccagtccagcccatcatcacggtctgatgttcaccttctttggcgcgcttcagatactcgccccactcgtaggtgacgattttggctttcacaccaactttcgcccaatcagactggatcatctcggccatacgacgagcattcgggttatacgggcgctgtaccggcatcgcccacagatcgatagagaaaccgtctggcaaaccagcttctttcagtaactctttcgctttttctgggtcataggcgtaatctttgatttcatcgttgtagccccacattgttggtgggatcaggtttttagccggctgaccagccccctgataaactgctttgatgatcgcgtccttgttcacggccatagtcagcgcctgacgaaccttgacgttatccagcggttttttctcaacgttaaatgacaggtaacccacgttcaggccagcctgctccatcagattaattgatttgtcttctttcatgcgggcaatgtcagccggattcgggtacggcatgacctgacattcgtttttctgcattttggcgtaacgcacagaggcatctggcgtaatagagaagactaaacgatcgatttttggtttggtgccccaataaccgtcgaaggctttatacaaaatgcgtgagtctttttgatactgctgtagctggaacgggccagtaccgattggattcagatcgactttctccggcgtaccggctttcatcatgttatccgcgtattcggcagacaggattgaagcgaagtccatccccagatcggccaggaaaggcgattccggacgagtcagcacgaagcgaacggtatgatcgtcaactttctcaatgttgctgattaactcacccatccccatcccctggaagtactcatagctgccgccagagactttatggtaaggatggttggcgtctttctgacgcatgaaggtgtagatcacgtcatccgcgttgaaagtgcgggtaggtttaaaatctttgctgccctgccacttcacgtctttacgcagatggaaagtgtaggttttgccgtcttcgctgacttcccatttctcagccagcgctggctgaatttctgttgtaccaatcttgaactcaactaaacggttataaatggcacgagagctggcatcgtaagtagtgccagaggtgaacaactgcgggttaaagccttccggcgagccttctgagcaatacaccagtgtttttgcctgaatcccggcagaaacagccagcgcaaccagcccaataccgaattttactatccctgcctttcccaaggaaatcgtcatcgcttgtgctccattgtggtgatgtgtgttgtgtgtacagccagaccctataattttttagtccgcggtctgtgctgttctggcctgatggccgcaggaatggtggaatgcgatgccgaatagaaacctattcaggcggtcggtttgaagaggttaaaaccccaaaacttctgtcgctaactacccctgagggtaccaatttggcaacagttaacagcaacgtcaatatggctgatggggttttatacagagtatgagaaacagcaagcaaacataaaaaaaactttttattaacataattagcattaaaaattatgctactactaattagtcagtgttatccactgggtaaaattcatactccagtggtaatacccagagataatcagaaaaactttgttgctaaatgatgaaaatctgctcaattatttttgtgatctcacagcaaaacaggatgaaatgctgccttatacccataaataggtgacgactagactcatttcatacatggttcattcatctttaccgactggttcgcgaaaggaataaggtcaggtcaatcaaaagcagatttgagatcgttgggcgtctagccttcgcgcaccaaagcaaagcaccaaaatagtgcgtccgggcaaaccgctttaatcacttcgcattggccgcataaaaatatgtctttgcgccgccataaatcacccggcgcttcaggaaaattaaaatagtcctccatcaagatctgaacgttttcttcacccctaagccgccttggatcagacccgaatcactggtcagcctttcgacgtcctcaaaacgacaaccattacataaaaaccctgacctgttagcgataactacataacacgcgctcttttccccgcgatgcccagctcgccgtctctctaactccttttcattaataataatcttggcttgatcgcccgttaaataagggtttccaatgggagaggtagccagaatattgttaatatattatctgatcatgctttttacgatccttcacttcagatttagtcaatttattgtatgaaacgccatctttactcggagtctgaatatttattatcgtacttaatcctccctgaaaatatctatcctgacatttacatttttttcttttctcgctgatattaatccagctatttggctctcagccgcttttttatcgaccacgatttcagctcaaacatttgacaagaataaaagaaagaatattggtgtataaatatctatggcgttgaatggcatgttgaaataagcattgaaacattgagcgcgctcgttcgccctccttaactatcaacaaagtcaagtgacaacagaggtccggcgtctggcaggtgagagtcaacggttgatggaatgcgggtctataactgaactcttggtttgctggtataaaaggtttactcgctgagcctgagagctaagagctaagagctaagagctaagagctaagagctaagagctaagagctaagagctaagagctaagagctaaacaatgttcacgggttcttgtgtaaatgctaatgtatagttaaacatcgcaagcaaagtgagccactctatttcttgctggtagctgatattgccgtccaattgccaatcacccaaccggcggccaagattacaaccccaaactccatcggctcaaacgtcgtctctgtattacgatccccgtatcattgagaaaaaaatgacataacactttgtatgagaaccgagtaaaaccttttctctattattatcctcaaattgcctatcaagtatatattcatccaataacattagatgattccaaatttataattacggattaacatcaaatataatatccaagataaataaaaatcctatcgagataaatttatgccatcgagtattaaatatttttatttatagtaataatactatatctcagtcctgacaatgggatgtatatcattaaaatcaatgataataaatagaggtttttatttatactgaaaatattcacaccgtaaaaaaacctttcatataatatttattaatgcctgatgcattaccaataaaaattaaaacttatccgatagattgattggttaccttccactgaagtcagcgagttaatagccaaaagatcccgcgggaacagacagaagatttattgtaggaaaaggttggagtcttggagtcttggagtcttggaatcttggagtcttggagtcttggagtcttggagtcttggagtcttggagtcttggaatcttggaatcttgagaatattgaggtctataaacgaaaaaaccccggccaaaaagccagggttcttaaatgtggtcggcgagagaggattcgaacctccgacccactggtcccaaaccagttgcgctaccaagctgcgctactcgccgaatcggggcgcatcttactgctacgctcctggggcgtcaatcactttttaacaaccctgcgccgagtgttgataaaatcaccggcgctgactaaaaagtgacttacctcccccttttctacctctttgatcaggcgttggcttcaacctgacgcggtgactgcgcgcgtaggaatggcaacaggaacaacgcggacatacaggcagcaatagagataaccacgaagaagccgttccagtgccacacttccatgatgcgtgcaatcgggtagccagataatgcggcccccagataggcaaacagaccaacaaacccggtagccgcaccggcagcgtctttatgggagcattctgccgccgccataccgattagcatctgtggcccgaaaatgaagaaaccaatcgcgaagaagcaacctgcctgaagtacatagctgatgcccggcataatccacagggacgccacggacaggaagataccgatagagaaaatcaggttcattggcccacggttaccgcggaaccatttatcagaaccccaaccggcgaccagagaaccgataaaaccgccgacttcaaacaatgaaattgccgagtttgcggtcatcagggaataacctttttcctgagtcagatacaggttaccccagtcattaatcgcggtacgcacgatataaaccagcacataagataccgccagcagccagatgtatttgttcgtcaatacatagcgtttcacgatttctttgttggtcagacccagaccttcagattcctgtaccagttccatggcgtcattacgccatttaccaacgctcggcagccccatggtgcttggcttatcacgcagacgccagcacatcagcaaaccaatcacgacgccaataatgccaggaatgatcatgccgtaacgccaactgaaatgcagagaaataccgcccaccagcagtgggattaaagcaccaccaaagttatgagaagtattccagatcgcccaccagccgccgcgctcagagcgggagtaccagctagtcagaattttggaacacggcggccagccccagccctgaaagaaggcgtttaaaatccatagcgcgccaaatagcagcagggaagaactcataccaaatagaatattaattatccccgtcataatcaggccgatacccataaagtagcgcgggttggaacggtcactgatcatgccggaaataaatttggaacagccgtaggtgatataaaatagcgtgcctaaaatgccgacgtcagacatggtcaggcctaaatcgctgagcattgctggcatgatgaagttgaaacttttgcgggtgaagtaaaaggcggcatagccaatgtacatcgtccacatcaactgaatacgccaatatttgtaggtcgcatcaatttctttttgatccgttaccggcggcacgttatcgcggcttttaaagaaagaccacatgttgaacctcagacattaataaaagtgtggtcatcatggcgcgcgcgcgtaggaaagaaacggggtacattcccaccggcaccgagagtatttcctagttttgcttagttagcgaaggaactgtgggcaggatcacactcaaacaggtaccgttatccacctgaaatttgaagtgcccgcccagcgcgctaacccgctcctgcatcccacgtaaaccgtagccaggcgtgaacttctccagattcaccccttttccgttatcgcgaatagtcagatgcacctgctgcttaacctgccgggcatcgacctcgatgcgactggcttcgccgtggcgataagcgttcgtcacgccttcctgacagatgcgatacaaggtgattttcagggtttcatccaattgcccatcgctcagttgccattgcaatacgccaaccacagattcatcctgcggaataagttcgcgcatcagcgccgccaccgccgcagaaagcggtaaattgttcagcgctgctggccacagctgcttcagaacatcatgaacgccgtcataaacccgcagcgccagagtctcaatcacgtcagaacaactcactaccggtgcctgatccgtcaagcgccggatgatggtcgcctgagtgcgaatgaccgtaatactttgccctacttcatcgtgcagctcgcgcgcgacttcccgccgggttctttcttcggcaatcactaagtctctggctaatcggcgattttcactcagacgcgcagaaagttgctgattcagttcccgctgacgttgaatgcccgcccccaacaataagccagtcagactttgtgccaacagagaaagcaataaatcccgatgagaatcaagctgggcgggttcattaaccatcagcgcgacaccgtttagcaaggtcgccactaatgccccctgccagccatagcgataggacataaacacaatggggatagccagacaaaatggtgcaaaacgccttaattccgcttcgctaacctgatgttgcagccagatactcagagcaaacagcagcaaataccacaccagatggcgcaaacgcaggttaataggcttgtgaatcagccccggctccagcggcagccagatttgtcgcgccagatagtgccacagcaacaggcaggtgggcgctatggtaaatcctcccgccagccccaaaagtagcgccatcgcgccctgcgcggtggaaagctgccatatcaatgcctgaatcaatgcggcgatagcaaccaccgaaccttgcatcaacggccactgccactcgctatcgctctgctggtgccgcaatagccaaggggaggcaaacactgccagcaacgtggtaaacagcaatacgggtaaggcagtccacagtaatatcaggctatcgaattgatctgccagcaaccataacagcaaagtgtcggccaataagattcccggccagtaaccgcgcgggctttgcagtaaaatgcctaaacgcagcccgaaggggaagagcaataatgcctgtaatggctgttcgaccagcagcgtcccaatgctccacagacaaaatgcagcggtgaaatagataaaaaacaacgctaacagcgtaatcaggcgctgcatcataaattcaaaactcgcttcgctaattcaacgttattactgacacctaatttggcgaacagattagcccgatgcacatgtacggttttaggggataaacccaaagattcggcaatttccctcacttccatcccctgagccagtaaaatagccacttctcgttcacggcgtgtcagcggatcgaccgcgacttgcaccagccgctgggcaatttccggcatcagataaacgccaccgccgcccacggtgcgtaccgccgtaatcaggtcatccggcttgcagcgcttggacaaaaagcccttggcaccgcgttctagcgccatttcaactagcgccggactgtcgtgcatcgacagcatgatcacgccgataccggagggaatgtctttcaacaaatccaaaccgctttgatctggcatggaaatatcacaaatacaaatatgcggattcagccccggcaaacctgcgcgcgcctgctctgccgaactaaattccccaaccacctggatgtcgtcctccatggataacagctgcacaaagcccgatcgcacaatgtcatgatcgtcaataaacgccacgcgataagtcatggaggtctccagttactggggggaaatatggcgaggagtatacaacaagcgatgctcaactgcggaaggaaacaggattaacgccggatagcataactagccggcgtggatgattaattagcgcgacgaattttcttctctggcgcatgacaccagttatttttctgcgcaattcccccgtctggcgaggtataacccagacaacccaatatggaatcaaacagctcttcatgacgatgttgggttcccaggcgttgttgggcctgtaaattctcaaacgcattttggtgctgcggttccgccaggaatttatcggaagcccacaccaacagaggaacacggaattgctctacaggagccatttcacgaggagtaccgtggaaatgagcgttggcggcaatggattcgccatgatcggcggcgtaaaataccaacgcttttttatctcttacctgatcgataacgttagcaatgaaagtatccgtatataacacgctattatcaaaggcattgaccaattgctgacgagtacaggaatcgtctacgcccatacattccggcgtgtagcgagcgtaactgcggggataacgttgagaatataaataatgagaacctttggtatgtaataccaccagatgctttccatccggatagcggcccagtgactctttcagttcatctactaacaacatgtcatccaccggtttgccgtcgttgcgtttctcagaggcaatgatttcacggaatgagtaattatccgcattggcattattgtagaaccacacttcgctttgcatcgcgaacagttcagagctgaagcccagtgatttcagcacggagaaaatattctgttccttcaaagtacgctgcgggttatctgccgccccgccttcccgaacaaacatgcagcgcagagaaagttttgtcgaggtatcgcaagacgtccccttgaaagccaccaaattcttttctttactcaggcgcggcgtggtatcacgcggatagcccaaaattcccatatgatcccagcgggtcgtttcgccaataataaagacgacataggtttgatcgatatctgcgggggcaacataggtaaattctttggtgggatcgagtaacgtagctgcatcgtggctttcgtcatattgggtgtaagcatataaacccaaggcagccagccagttagacggtaagtaagagtgagccaccacgccgccataactcggtaaatctaccgtctttagctgttcatccagtttttgcgccttatccagatagcgtaaaggcaaccaaaccaaagccaccacggcgaccagtaataacaatggcttaatacgctgacccggcgtgcgacactgctctagcaacgttaatcgcaaagcgttcttccaaatcagcagcaacggtaagacgctgaccaacgccatccatagaacgaaatgcagaccaatgacttctttcgagaggtcgatatccgtcgtcatcaccgacaccacgatgccgtaaccaatcactacgttgaagaacgtcatgtaatagctggcagcaacggaaatcagcactaacaggctggcagtaatgcggtaaaacaaacggccacccagcgaaatcaggcgcatcacaaagaaggtaaacagaataatagccaccacctcagtgacggcggaaagcacctttatgccttgaataccctgggaaaatgagtcgaatctacggtaaaagaccgaaatattcaggaaaataccaatatagatagccaacaacaaagacatgttttgctgcgataaagacttaactctgtccataaaaaatgggatcccgggggcaaactatttacaacttgaatgtatcagacagtaatcatcactgctggttccgtttacaggtgataagcacgctattgatttcaccagcaataaatatcttatggattatcacgcgagcagacatgcgccggaacaaagttatggcgagaaaatcaggaaaaaaacagaggaatggcgagagaaaggtaaataaaagaggggaatagataaatcatccataaaggacatttcgccctttatggatgcataaaatccagacgagcctattacttcaggttcagcgtcacgtcgatattgccgcgagtggcattagagtaagggcacacaatgtgggcttttttcaccaactcttccgctacgctgcgctcaacgcccggcaggctgatatccagctggacttcaatgccgaaaccagtaggaatagcgccaataccgacggttccttcgatttgcgcatcatcaggaattttcactttatcctgagcggcgacaaacttcagcgcgccaaggaagcaagcagaatagccagcagcaaacagttgctctgggttggtgactgcgccgccagcgccgcccatttcctttggcacacccagtttaacatccagtacgccgtcagaagaggtcgcacggccgtcacggccaccggtagctttggctttcgcacgataaacaactttctcaatagacataatattttcctttttaggtaatcattggcctagtttatgtttcaagaaataacatttaaataagttactattaaatcgcacactatttaaatggttttacaataataagtgtagaacagattggagccatgtcattgtggctctcatctatggaaatcagatttcctgcaacaacttctctcgcaatgattcaagctgttgttttatatctactaatttatcaaaatcacagtctgcagcgcacatcaccgcttctggaataccctgagcctgctcgcgcaacgcacgaccttgctcggtcaaacggatgatcacctgccgctcatcattggatgcgcgggtgcggatcagcagttctgcgttttccatacgttttaacaatggcgtgagagtcgcggaatccaaaaacagccgttgtccaatatccgataccgtcacttcatccctttcccacagcaccagcatcaccaaatattgcggataggtcagacccagcttccccaacagcttacgataaactttatgcaacgccagattggcggaatacagtgcaaagcacatttgctggtcaagcagtaacggattcttcaacgtcaggcgtccaattcaaaaactatggattcaatatatatagtgtgcgatgtaatcgcaagcaatttcagctcaaataaaaagcccccagtaaatggaggctttctgcgcttactttacttagttacttagctggcgcgtctattttggcatcaatgcgttgcagcatatacggatagaacggatttgatgaaatacgcatcagagaatctaatcccactaccagcaccgctcgctccccgcgcgcagcaaaggtgcccaagctgataccgtactgatcccgaggttccggatagcggccatacagcgaatcgctcattgggaaaggcaaagccacgtgagacagcgagaaaatgtccggtggataaatcaatccggtcggtactgacgtttccgtggtttcaccggccagagtggttatggccaaagtgtcgttactttccggtgacacattggtaattaccgtggtgttgtagttacgcggcggcggcggcaacaaacgagccaacgcggtataagacgacgtgcgtaataacgggccaaagctagcggcgcggtttaaatcaaacagcaccacttcactgccattttttggcaggtgattgtacaacgcggtaaccacagcgcgggtactaacggtggaatccatcagcgactggaaggtcagaatgggcggcagactttccagtttgttatctcgcgcatcgcgggaaatctgctgttgcagcgccgccgtcaacaggtaggattgtcgagccgcatttaccgggaacgaattgtatttaaacgggttaaactccggcactatgcccaaccaggacgcttttgcaaacgcggggaaaatagcgggccagccagcgataccggcaaaacgggcaaaactggtgacgccaatcatcggtgaaatcaggatcactcgctcaggtttcgctaactgcggatcttccagagaatccaacgcatacttcatcgccagcgcgccgccgttggaaaagcccacaacatgcagcggcaactcttttccgctcaatatcttggcttcacgaaccgccaaacgggtagcggccatccaatcctgccaatccacatccgtcaacgccgcaggtacagaaccatgagccggcaaacgaataccgacagccacgtagcctcgttgacgataattttcggcaatatgacgtaggctgtatggcgtatcggttaaaccgtgtaataaaaccaccgcccctttcggcgtgccttccggattcaatatataagaacggttccagtcattggcaaaatgcggggaataaatagggctaccggaatagtaacggtttaacggcacctcaactctgggttccagcttgtccgtcacattagctttaacttcggcaaaaacattgtcttccgctttcagataatccgcccagttggctttatctatttctcccgcccgcatttcatggggaacaaaggtatgccaaagctcaagtttagggcctctttgcgtatcgtaaattcgcacggccaatagggtaacggcaatcaccaccactaccagtacaattcgtttaatccaccgcgtaatagctctggtaggcatgcgtcgctactcccgacctgtattaggaatcaatataacattgagtttatcaccattcggcaatcccagtatcttaaccggatttcattcggctagaatagaagttaacgttgaataaataagcaattggttaattaaacgactaaaacaacctgcgctattttccactaaggtaaataaagaccctagttaaaattgaatctcacaaattcactatatggataaaacatatgaatagccctcaaactgagccaacgaccaaatcaggtagcggctcgcgtcgtgattatcttcgcttccatcacactcacgagcatctgtccggcccctttggcaacggctggtttgcgctaaaagcagaggctttcgcccgattttttggcactccgctttttctgggagcacaaacgctgattgttgttctgtggatcggtgccaacgttatgggtttcgccaaatttgatatctatccctttatcttgctgaatctggcgttcagcttacaggccgcctacgctgcgccgctgatcctgttggctcaaactcgtcaggctgaacgtgataaagccaatgccgaagctgacgcacagcaccgggaggcgctggctatcgccaatgaggaacgacagaaaatggccgcgaccatggccgaacaaatgctggaattattgcgccaaaataccgaattgacgaagttaacacatcagctggcagcgaaaattaatgcgtcaacggcggggaaatcaaaagagagttaaaacgaaagtgaagtagtgaagtagtgaagtagtgaagtagtgaagtagtgaagtagtgaagtagtgaagtaaaacaggctgcatcaagcagcccgttcattcctttcctcaacgtagtttaagactcgctacgctctgtcaggtcaaccggtgttgccgacgcttttcgcgcccaaatccaccatgccagcgtcattaatataatccagcctaatcctacatacatcgcaatccgagtatccgggaaatagcccaacaccataataataaagcccataaacagaatggccagcattggtgctaccggccagaatggcaccgggaatgccagacgagaggcactttccttactcatggagcggcgcatggctacctgcgaaatcaggatcatcagccatacccacacggtggcaaaagtggcgatagaggcaataatcaggaatacattcttcggaatcagatagttaagaaccacaccgcacagcaaagccactgacatcactaaaatcgtcatccagggcacgccattacgcgtcaggcggctaaaacatttaggtgccaatccttcctgagacataccaaacatcatacgccccgcgccgtaaatatcgctgttgatcgcggatattgcggcagtgatcaccaccaaattaaggatatttgccgcagaactgattcccagactgctgaaaatctcaacaaaagggctcccattctgcccaatgctattccacggataaatcgccatcagcactaataacgtcagaacgtaaaacagcaaaatgcgcaccggcaccgtgttgatggccttcggaagcactttttccggattcttcgcttcgctggcggtaaccccaatgatctcaataccaccaaaggcaaacatcacgacggcaaatgaagctatcacgccactgatgccattcggcataaaaccctgatgcgaccacaaattacttaagccagtgctttcatgcccggcaccaaagccaaacatcataatgcccaaacctgcggcgatcatggcgataattgcggtgactttcagcaatgaaagccaaaattccatttcgccaaatactttaacactgcacaaattcagcgcgccgataaagaagataatgctgagcacccacacccactgcggcgcgtctgggaaccataaccccatatagataccgaacgcggtaacgtcggccagcgccacgatgaccatctcaaaagtataggtccagccggtcagaaagcctgctaacggcccgaggtagcgaccggcataatgaccaaaagaacctgccaccggatcgtgcaccgccatttcacccaacgctcgcatcaccatgaaaacggctgcgccaccaattaagtaagccagtaacaccgccgggccagccagacgaatcgcctcagccgaaccataaaacagcccggtaccaatggccgaacctaacgccataaagcgaatatgccgcgcgctaagaccgcgtttgagcgtggatgaatcatttttcatggtgcattctcgcaatgtttaagccctttcaggcaggggttcagagagggtgataccagtatttggaatcacccataagatctgtttttattattttatgaaaggcttggaagcaatccggcaggcatcaacgcatttaaatggcgctgagacagcagttgactggcggcttcaatgtcgggagcgaagaagcgatctttatcataataggccacctgttctcggagcaaatggcgcgcagattccagcgtatcagacgtttttaagcccttacgtagatccagcccctgacaggccgccagccactcaaccgccagaatcccgcgcacattttcggccatttcccacaggcgcttaccggctctcggtgccatagaaacgtggtcttcctgattcgcagaggtcgggatgctatccacgcttgatggaaaagccagccctttattctcactggtcagcgccgcggcggtcacctgtgcaatcataaagccggagttaacgccgccgttatccaccaggaacggcggtaactgggacatatgtttatccatcattaacgagatacgacgctcagacaaagaacctatctcggccagcgccagcgccaaattatctgccgccatcgccaccggttccgcatggaagttaccgccagatagcacgtcgccctgttcggcaaagaccaatgggttatcagacactgcgttcgattcaatcgccagaacttcggcagcctgacgcatttgggtcagacacgcgcccataacctgcggctgacagcgcagagaatacgggtcctgcactttttcgcagtttctatgggaatcagaaacctggctctttgtgccgagcaagtgacggtaagcatgggcggcgtcaatttgccctctctgaccacgtacctcatgaatgcgagcatcgaacggactacgcgaacccaacgccgcttcaaccgtcagaccgccacataccgtcgcggccgcatacaaatcttccgtttcaaacaagccgcgcagcgcataagcggtagaaacctgagtcccattgagcagcgccagcccttctttcgccgccaacgtcagcggcttaagaccggcttttgccagcgcatcggtggctgacaaccacgccccctgatgacgagccttgccttcacccaacaacagcaaactcatatgcgccagaggtgccaaatcgcctgaagcgccgacggaaccttttaacggaatatgggggtaaacctcggcattaatcatcgcaataagcgcctgaatcacttccagacgaataccggaaaaaccgcgagccagactatttactttcaaaaccataatcaggcgcacgatagcgtcatcattggcttcaccgacgccagccgcgtgagagagtacgattgagcgctgtaagttttccaaatcttccgtcgcaatacgggttgaagctagcaatccaaaaccggtgttaataccataagcggtgcgtttctcggccaaaatggcctgcacgcaatccacacttttctgaattggcccataggattcatcatccaggatgatgcgtaccggctgctgataaatatggcgcagatcggccagcgtcaactgacccggacgcagtgtcagagttttcatgcttttttcccttgagtggcggcaaccatcggcaagttaagcccttgttgttgcgcgcaattgatcgcaatctcgtatcccgcatcggcatgacgcatcacgccggtggccggatcgttatgaagaactctggcaatacgttctgcggcctcatcgcttccgtcgcatacaacgaccatgccggaatgctgtgagaagcccatgcctacgccgccgccgtgatgcagagaaacccaggtcgcgccgctggcggtgttgagtaatgcgttaagcaacggccagtcagaaactgcatcggagccgtcctgcatcgcttcagtttcccggttcgggctggcgaccgagccggaatccagatgatcgcggccaataacgataggggcagacagctcgccactgcgaaccatctcattgaaagccaggcctaattttgcccgctgacctaaaccgacccagcaaatacgcgccggtaatccttgaaaactaatacgttcgcgcgccatatccagccaacgatgcaaatgctcatcatctggaatcagctcttttactttggcatcagttttataaatatcttccgcctctccagagagcgcagcccagcggaatggtccaataccgcgacagaataatggacgaatataggcaggaacaaagccagggaaatcaaaagcattactgacacccatgtctttggccatttggcgtatattgttgccgtaatcgaaagtcgggatacccattttttggaaagccagcatggcttcaacatgctcggccatagaggttttagccgcgttgacgactaaagttggttcgctttgcgcgcgctgacggtactcttcccagccccaacctttcggcaaataaccattaagagggtcatgggcgctagtttggtcagtcaccatatccgggcgaacgccacggcgtaccaattccggcagaatttcggcggcgttaccgcacaaagcaatagaaacggcttcgccagcagcggtatattttttgattcgcgctaacgcatcgtctaaatccgttgcttgctcatccacatagcgcgtttttaaacgaaaatcgatgcggctttgctggcactcgatattcaacgagcaagcgcccgccagagtggccgccagaggctgcgcgccgcccatcccgcctaaaccggcggtgagaacccagcgcccttttaggctaccgttaaaatgttggcggcctgcttccacaaatgtctcataggtgccctgtacgatgccttgactaccgatatagatccaactgcctgcggtcatctgaccgtacattgccagccctttcgcatccagttcgttaaagtgctcccaattggcccaatgtggcaccagattggaattggcgatcagcactcgtggcgcgttgctgtgagttttaaacacaccaacgggcttaccggactgaatcaacagcgtttcgtcatcattaagctgtttcaggctttcaacaattttgtcgtaacattcccagttacgagccgctcggccaattccgccataaaccactaattccttaggattttcagccacctcaggatccaggttgttcattagcatgcgcagtggcgcttcggtaaaccagcttttggcattcagttgcgtaccacgcggggcgcgaatttcactatcacgaaatctgttttcagcagtcacggcaatttccttcaacagggtttctgagtgccaataggcactgctcgctttggatgtttattaacatatactcgtatagacaagtataagcaagctaaggaataacaactgacttttgaagataaatgacggtgtgaaattacaaaaacactttataatcaattagttatatttgtatcaaaattgatatatatcggttcaaaagaatattagacgtgatatcactaacaaaaccagcataaaattggtctatttttgcgcacaaaatcacatatatttcacatttggttcacataaatcactataacatttaacgcaaatgataattattcacgttaaatggccatcccatcgacaagctatttaacataatattattggcagtgaacaaccttcggcggtaattggaatgaccatgatgccatcgattgttgcggatttatgtccaaagaatggcgctggcgaagaccatccgaatcggccttcaaagccttatcttgctggcttttcggccagggctgctgcatattttttctagcaacattggctgtggtattttctctttgcgacaaggttccgagcaatccgagaaaacccggcgttaaagcggcagatttcccctgatagtggttaatctgtggccctttctcactcatgctcaaaatcgcctgagccggaccagctaaaaagtctgatacatactgccacgccagcgcctgccgctcatcgtagctcagccctttcccattctggttcattggctccaatacctgatcctcccactgtttctgaacccagcatccagtacagcgaatagcatgagctaatagaaaatcaccgtcgctttgatacagcttccacaccgccattattcccaaatcctgcgcatgattaccggctcctttttgcagttcgacataacgttgaaacagccgttgcagcggattactcgtcgtttcctcctgttgctggaacaacccttcggtcaaattacggctatcctgcgcagtcttgatactttcttcaaccgcaaaacttaatgcctctcgccaagcctgccatgcgcggagcgacactttggttgaagccgctgccgaccgaggctccggcatcagccaccgctcgatacgctgctgccattgttgctttattttgtgcagatatcccatgttcggtgatcgcgtagtatattgatcgagaatgattaaacgccggtgttcttgtaaccaaggctggctctgcgcttcggaaatatcagataattgcagattcatttgtctggcaaattccatcgacggactactaccctgcctgatacttaacaaacgatcctgccactcctgcgcgctcaatggcggaaaatcctcattaaccacgttaaatagaagctctagccagttttcctgccgaatagatggccattgctggcgaaaagcggtaaacgttgtcagtgcaatatcatcgccaaccgcctgttcaacggtttccagccaatcatttacctgctgtacgcggactaacgtccaaagatcgggaaaatcgtccatagacaaagaatggagccagatgttaactgcaggctttaccgaagcattagatgcactggccagcaaccagcgccattggggatcgctttctactaaccgagccaataattgccgtagctgagttaactcgcttttttccggttgtaatcgccattgcgcacgctgcaaagctaattggatgtaaggtaataaaataggagcggcaacatcagaaactggttttttgacataacgtagccgttcaaaagaatcgacaagataatcgtgctcgaaaaggctttgtttaaccaaaatatactgagccaacgccagtatcatttcacgctgccgtattggtgcttcagtgcggaagcggtcataatagcggcgaaattcctctgtgatatttcccaaatcagcaggagcgctttccaatagcgctttttcaatagttcgatgctgccatttcaatatggggataaaagggagataactcagcggcgaatcttgccagcgctcgttgatctgtaattgagtaaccaacgcatttggatcgagactttttattttaaaagtgattaatgcccagctccgccatccccagagaaccattaatccgaatagcatgactaataatcctattctggcctttttatggcaaaatccccgccatagcgtaataaagatacgcaaagctaaagaccgctgagcccacattcccgccccgtggaggagcgttactttcttaatcataggtcgagcctgtaagcatcaaaaaaactcaatccacgaaataacagagaaaaaaaggagtacaataatagatgctgaccatctcctattaataactcgatttaatatcaacttaattattgattttttcctggaacacatcagtttatggctaatatcaactaatttgagataacaatactcaggcaagcatttttcttcattggcaatagttttatccaggaaaatatcgttgtccttgttatatttcccatgaaatcctagccgcaggcaaagtaaatagaccattcgaagctcattttcatttttatcaattttttctagctggttgaaaaaaacatccccaccggtagtggtctgaaataattgtgtttgcagcaaaatatctttccattgcttagcataagagagcgaggaggataaaataaactcatcaaaccaaaccatgacagccaataatgcccgatcgcattcagaatcactatagccctgcgactccgcggctttcgccgccctttcaaaaacctctgtggttttttcacgaacatactgataattatggttaaaatcaggctgtttttccagaatcaaagcgaaacgaaaaacatctacataacagtcaattaatgtcttcataatgccaccgagcacataatctcattttcctgagttaatagtgcgcttaacaaataaggtataatccactgcctgttaaaatacatgttaatccactccctgcttatccttgatttatcctgctgaaagcagccatagccaaatatctcataacgcaacgggacttatctgatagattcacaaataatattaaaagagtacatcattgctagatattcgacagattaattatcattaaaatacatgtaaaaacattaaggaccgatttaatacttaattatttaacaaactgagccgtagcataaaaaactcattactcattatgaaggtatggcaacgtaactcttacaaaaaaaggttatttaattcattaagcgtgccacttttaattattatatagaacaataatttaatttctttctaaccgctaaacctccaatttatagctgaatcctacttaccggattagacagcgacccgaattgctcctgccagaagaaaacagagaatgtgttttggacgatttttttggatgggtatttgtaactaaaaaatcaccatgaaattctatacacatttgtggcagatttaaggggggcgcggaacatcacagacgtgaagtgacagtatcataatgatatatgatggttttctagactgttttggaggtaacgggagaaattgtggcgatggcgggaatgtaggtgtagcgagcgctacgagaatacgctgggtacatgacgggccaatccatattggttaacagacggtcacggcgaatggtattcaccgcaccaaagcggaatcgagctgggtcatatttcttatccttcagtgaattacctaacaagctcaaggcgcagtaatgcgcgtatcgtctagaattactgcagtaatatgtgtatgaaatttgattgaatgccaaaaaaacgtcttttcattgaggagattagcctaggcagttgtataagtggcttcacttctctcatgattcagtgaaccaacttgtttcctacctcaatatagtgattgatttgcttagccaacatcccccaaggaacgaaacatgttacgaggttctgaaaaaaagaagcgctgaaaagtttagatcgcgtacgccagtactacgaatcacaagttgaagccacccaaacagaggttaacaatctcaatctgctacgtcagaaatgcagcaagaccttaatggctcatattaaaatctgtgttaacgatctgacaaatatgccaaaaacattccacaagtcatggaatgaattcaaataggcaatctctatattcgacaatactgaggaaaaaatcgaaaccgaatatcgtaacacccatattgaaccagaaagagttagatattaatatttgaactcatcatgcaccagccttcaaagactctattctattaattagtaattcaatatcatcatagatgaatttagaatagaatatccttctgggataattcttcaattctgcatgagccacgttctcaactggagatgatatttgccacaagatattaccctcaccagactcatccctgaaagaaaaaacagtgaaatcatcaagaaaagtaccaaaacttacagagtagcttctcgctaaatcacttaaatcgttcttttcatcgtcataaaaatcatcatcggatatacacaacgcttcatttaacttacaaaatatcgcctcttgagattcaccccccaaaataggttgtaacctttcctttttcattatatccataagaccgccaaccaagtaaccatcaagatatattaactctgacaatgcgcctaaactattaccctcaaaccataatctggcataccccataaataattttgaatcagaaatgtcatattcaattccaacagtcgattttgttcctatcatattaggcatactcaacatcccttcatatttcttgcgtacttaggtacgtttttcttatctatggcacgagggtttccgcgtatatctacaccatcggttgaaccattccaatggaaggcacctgaaccatcagcagcactactttggaacctatgccaattagctttcttcccctcacctacttttgtccaacttgttttaggatcattaggatctagctggctttgtctaaacagctcctcatgattcgaaggcaatacacttttcgatgaattttgcccagaataaacgggacggctacagcgatggtcagccggtggatattccgcatgggcgatgggtggatttgcggttggagatgccagtgggtgaaatcgagggttcagaataggctcatatgatacgtaaagggcaacttcagcaccctgccggagagcatctatcaccggcagaacaattttatttgttggccgcctaaaaaacaggcaacacaatttttgccgacacagcaatgttaatgcgacacaaccttttcattgtcagttaatgtgagctcaaatttgcgctgattgcgagcccgaccgttttcgattgcaagccgttacacctaagcatgattcttggcttcttatcccacccccaaaactcgctagtcgccattgaataaaccaatatattttagcccattatactgatctttaattggtcgttttatcactaagttgggatcttgataccaaaatattgcattagcttttttaatacccaaattatcacattcactttttactaatgataattcatcctgatcaacagcagcatcgagtagtatctcatctaaagacacttcttgcttatgtctaggtatcatgccaatgaagtcatcatcataccattggatgccgatgtctttgcaaaacgcacactgcctataattagggttattaaagtctccctcaacagaataatccaactcaaagtattccatgtattcctcttctgaggagaaattagttccaatccaaacgtgtactttattttccatatttaacacctgcttagtttcatgtgacctttatgatgtctagctattatcttcttagcatcagctttagacgttgcaccttctaaatcagcaattaacttattatggaaatgtctaccagaccggctaccatggtgccctccatccggcacaggaagtcctttagaatcagttacattagtgaatgtgattctatccgtgtttacagcgtatttttttaactcctcagcgctaaaacctaactctttggctttagctgctaacgaaacagggaataattcatgttttccgccgcttccccttaaggccgatgatactgacgctttattgtctataacatcttgaactgaatcagcattaaaccattcgttaaacttaccgaatccccaaggagtcaaccccgcggatccgttcaagttaacagagcattcacatacttataaattcatttcgtccgcgaacaagataatgattcgggcgaagcagagggaatagaagaccgctgttcgagatgcgaactaatgtcaatatcaccatgatttcatatcatttatagagctaacttctaaaaattcgataccataattcaatgcgcaattctttaaagaagatactagttctctatcaaacaatataaaactgtcccctgcttctggcatgtaatggtgatatataaaaaaaccacaaccaaaacttattattttttttataacatcactttcgtatccatgattgttggatagatttgaaatcagaggctttgcaggtggcgggtctaaactaagcgattttctcatttttatttcatttttcttttcaattatttgatatttatctaattccacacttaagtgctcaattttttcattactaccatatagataagcacctttatttttgacatttcccacactaattaatttcacatttgttgaattatctgcatttttatagaaatacatattagggaatgtatcattaatgattttcaaagaagtactagtagtaaatccataaggcccgtagttattgatatcaacatcatattgataacacaagcaataagctattgagtcaagatcagagcttattactctattccaatcaggaaccggaaattttattaatcgctctttgattaccatgtaaatataacctcttcgcctttagtgttaattgaatgaatatgtccggagtcatggtgtttaggtatatttggcatgccagcgtcaggatgtccatcgggatgttcaaaccattggttttttccattaggattccggcgacctaatttttgagcaccatcagctttcatctttccccatttatccccacggctagttggatttaaatcattcaagctaatgtcttgaccgccgcgagaaaccctcggaacttgtgcatgattttgagcttgccttaaagcatcatttcgacttttagcctttatgactctacaacttgccaagccccaagggtcgatccaactcagcggattcggcgcatattgatataaattcagtccgcccagtaacccgatcgggtcaggcgtgataaaccgaccgacttccggtgcataatagcggtaagtattgtagtgtaacccggtttcttcatccagatattgcccggcataacgcagcggctgcctgaactgccccagcggtttgctgaggttgcgccacatcgcctccgtctggcgggtcacctgcccaaacaccccatattgccctgaccacaccatgtcgccctgtttgttggtcacttcctgcggtgagccgttcaggtcggtatgataccaatacaactggtcttcaccgtagcgccgttcaatgcaggccaacggcgtataggcttcgttcgggtcgtaacagtaggtttgttggctgtctgcggtgcggctttgcagcaaccgcagtccttgccacagaaaatgcgtttcgtgccgctcctgccgggtgctcacgctcttgctcaaccggcggcctagcgcatcatagtggtactgcgcctcaaacaatcccttcggcccgtcccccttggcccccaccaaccggttatctccgtcgtagcgataacgctggatacgggcgctgtcctgcctgaccaccatattgccaaaggcatcatactgatattgccactgctcccagcgggtgaggcggttatcacggtaaggctcgctgccaccggtatggggtgaactctctggcgtctgtagcggcactatcagcgcattgtcggcccggtcataacgcaccgaggcttgcccactgtgtgccgagtagacgtgacgtagccgtccctcttcatcgtaaccatagctcacggtgccccggttgctgtcttccaccgcagccagttcatgcatatcgtcataatgataagctcgccacagaatcccttgctccggggaagtgagtgcctcggtaatccgatggctgacgctgctctgccactggcgacgccccagacggtcatactgccggtgctgcgtcagggtgccttgcgtgcggctggtttcccggtgcaacgcatcgcgctcaaattcactgactatctggtcattgaagcggatggcggtgacatgcccggagccgtagtggtgccaatggaactggtcgtcatttggcagtcccaacgtggtcaggttgcccaacgcatcgtattggtaggtcagcgcctcgacgccgttatgctccctgacgacccggcccagtttatcccgttcaaaagtgacggtattaggctggatacccagtttttcaccctgttcggtgggggtacggcgggcgctgagcagattgcccatcacgtcccactggtattccacccgttcggtctgtgtctggcgttcaatcacacggcctgcggcatcatagacaagctgactgggtttctcgggccgttggccttcatcgtctgccgtgccgcgttgggtgaccgcgctcatctgcccatcggcatcgtaagtgtagccataacgtgtatcgtccgggcgctgttcttcctgtaagcggccttccgcatcacggctaaagcgatacaccccgccattgtcgttatccagactgagcaaacgcccttcaacatcgtagttgtagcggatagcccggttcaggcggtcggtggtactcagggtttgcccacgtgcgttgtaatgccaatggcgaggcaggttgttccccaactggtggctgagcaacagcccagcttcagaccagccaaactgctcggtggagccatccggcaaggtcagtgtgaccagttggcctacatcgttatattcgtagtgggtttcctgctgcaacgcatcccggcgggaaagcagttgacccaaggtatcgtagcgccaggtcgtcggctggccggaacagtcggtgtaaagggtcatcaaccccagcatgttccagtctaagcggctctccccaccccgcgcatcggtcatgctatccggcaacagcgtgttgtcacgggggtaatgatactgagttgactgtaacaaccgatcggtttcctgtactacccgtccttgttcatcccattgggtacgttctgacgtgccatccggccagaacacaaaggtctgtcggtcgctgttgcgctgatactgccagcgcgttttcgcaccattggcctcggtgaccgacaccagcctacccagttcatcccactggcactggcgcagatgccccagcggcgagcggtaaccggcgggttgccctacgtcgtcccacaacagatgatgcgtgttgccagagcggtcggtgtaacggctgacacgacggtgttcgtccaacgcccacaccgtctggctgccatcctgccaggtggcaatacgttgacgctgctcttcatcataggccagtcggtagccatcgccttcactggtgtgctgttcaaccacacaccagatgtcgtcaatctcttgccactgatagtcacagcgcaatcccgtggcattctcatgccataacagcaaaccgttatgttcatcccagccaaagcggcgcatcaccgcctcaccccggtgctgtaccgccaccagttgccctttctcgttatactggtaacgggcacgcagcacctcaccagacaccgtgtgctgccagactgccgtcagacgattcagttcgggatggtactcacagcgcagggtttgcccacgggtacaggtgacgctctccatctgccgttgtgcgttgtagtggaatgactgctggttaccgacattatcgctgatgacacctagaggagcacggccctcggcatcaaaggccgggtagtggtaacgcagttcgcccgcatcgtggacagaccaacggccatcctcatgatgcgtgagccagcactgctggtcagggcagaacgtctggtggcctgcgggcacatccgggaagggaatgaagtcgccataggtgttacgccacagaataccgtcttccacctgccgcagttcactctcccagaacaggctccaaccgcgtcccagcacgccctcatagacatggctgctgagatagcgacgctgccagaacaggggtaattcaccgtcgagagtaaaatccagttcgtcgtcatcattgaggaatttctgcccggtcgtcacgtccaccggtttagccagaacgcctgccaccgacgctactattgccaacggggccaaccgacaggcgattttggctatcttgtccgcgcccggcagtttggcaaataacttttgaatcgcgcccggccccttgctggccgcccccccaaagcttatcaggcccgccgcaaacatcgtcaggtcagacacggtgtaggcccattggggaatttcagttgtgatgctttccgtggtggtcgtaccgccaccaataaacacgttgggtgaccccgccatgatggtggcatcacaggtggttttatcgctcttgcgggcggctggcaggccattgataaacacagaggatgagccctgagccacctgctgaaccttgtccttgtcgcagttcaccgtgctgagtgacgaaacagccgccgctttgccattggtaaagacattgcccgagccggtgataatggcaccgctgggactcatcgaaccggctccagcctcaacaccggcatcccgcgctttctcccccagggcgttcgccgccataccgacggcaatcgaggccccaatcagcagaataccgacaccgagacacgcagacgcgcacccggcagcaaacagcatcccgcccagaatgcccccggcaacgttgatgattccgcctaaaatcgttccaccaatcaacccggcgatagcctgagaatggccgatgggatcaccgacgcgtgccgcttccagcatgagtattcgctcctgtccgtgtgcgaaagattaggggtgttggtaactgtttaagcaatcagagaagaaggcttcatcctgttcactcagggcatgagcactggtcagcgtgaaaatcagcacggtggaggccgaaaccaaaaacgccgcctgacgttgatgcagtgtctggcctttttgcggatggtaacggtaaagcagcgtgatgccatggaacaggctatcgcccaagactgcgggctgttcgtcgagagcctggtacttgcgcagacctttttgcaatacctcacgctggcgagcgagataggcttcaaagctttcgtccgggcgtaactggtcacgggaaacattgagtgagggcttttgcggggcaatcaaaatattgacggtctgctcacggtaatcagcaggcaaggcgatactgccttcagtgaacacacagcgtaggtctgacacctgattcatccttgaaatccattcaatatccttatcaatgtcatgtatatttatcatactgcgatggaaaaatcaggaaaatcgataaaaatgcggctggttacatcatgctggctgatgtgtcagtgtcagtacatttctaggattatctgatgagaatgtaagtatcccagctttagttccacacactttttgagatttccggtttctcagccatcagccgatattcttccggcgtcagattattcagggattcatgaggccgctcactgttgtattcattcagccagcgctccgttatttcccgtgcttcattcagtgttctgaacagataaaaatccagtatttcggtccggtacgttcggttaaaccgttcgataaacgcgttctgtgttggtttgccgggcttgataaattccagcatcacgccatggtcttcagcccattgtgccagcgccagtgatatcaattccggcccgttatccatccgcatcttcagcggatagccacggtttgccgctattctgtccagcacccgcacaatgcgctgcgccggaatattcaggtcaatttcgatagccagagcctcgcggttaaaatcatccacgacgttgaaagtccgaaaacgtcggccacatgtcagcgcgtcgtgcataaaatcaatcgaccagctttggttgagggcttccggcgtggccagcggcgccggattacgcaccggcaggcgttgtttccctttacgacgaaaattcagttttagcagacagtaaatccggtgtatgcgtttgtggttccaggcgtatccctgcctgcgaagcacctgaaaaagcttcttaaatccayagcggggatagcgttcagccgcctcagtcagcctctggatcaccggttcatcacgtcgtgtattcggttgataacgaaacaccgtcctgctcagcgataacgtcctgcatgcctggcgtatgctcatcgtaaactgcgtggtcagatagttgacgagctcacgctttatcgctggttttaaagctttttttcgatgacgtctttcagcgcacggcattccagactcaggtcggcaaacatctgcttcagacggcgattctcgtcttctagatctttgatttttttgatatcagcggcttccatcccgccatatttcgccttccaattgtaatagctggcttcggaaatagcagcctcgcggcacacatctttgacggtcctacccgcttcgacggacttcagtacggcgatgatctggtgctcggtaaatcggatcttgcgcataaggatctcctcaggtgacatcatcagtatgtcggaagatctctaaaaatgaatgggccgtttaagcgggatacttacaaacagtttttataaaactattatctttaagaccttatttgaactgatgtagagcgtgtgttgtataggaaatggtacaacgagcatggattgagacgttgtgtgagagcttacaaaatgaccccaccttgactgaaacggagttataactagatgagccaaacaaccccacacccaattacacccgttcttgaaagttttaaagtggcgaaagcgcaacacctgaagaatgaagaaacctacgaagaaattattgcgtccattgcccgcagccagcaaaagcaacgcgacgccgaaaaccagagccaacaggctgacggcagttggcgcaaactgtttcgtagcctgcgtggtgaaatgacggatgagctgcaaaccgagcatatccgccggatttcacagcgggagctggcgcaagaattcgggcatctgattgaagaactggaactggataaagattacacgtcactgcaattatgtgcttctgcaagaccctataaagacacgcataaagtagcgttgatggaatatgcgaagatggaaatgtctgccgcaatgaaaaccctgtcacccgaactcatccgggcagtgaaattaaaggtcgctgtgaacgaactctacacagatacatcatcggagaaggctttgggtacacttacagcgactcttctttcattggcgggactctatacgtttgatatggaaaaagaatcgatattagccgaactcacactacagccaccacaaccgggttatgttgactctgctctgaacaatagtccgataaaatgtgcgcggttatttgaagcaataaaggtaaaacgggaaaaactaaacccagccggggagcaataattatgatgcgttgtcctgtgtgtaaacatgcgtctcatacgcgtgccagccgctatttatctgagcagaccaaagaggcgtattatcagtgtcagaatatagagtgttcttgtacctttaaatcgattgagagtgtggataaaataattacccgccctccgattaaagagcctgaaataataccagaggttattctaccagaacgaaaagtattaaatcgctacggttctaacgcacgaattcattaataatcccgctccgcctgtaacctctcaaggcagggacttttctccgactctcgccactttgcccttgccgtttaagggctttttctctggctagcctgccaaaatgagcactgcatgcatatagtgcatgattttgcatgcaacgcccttgcatcaaaacatctgaaacaccgcgctacaagggcttgtaggctctttatgtcatgcatgaaaagtgcatgataaagtcagagcgcgtaggcgggggaccattgcgcgcggatgtgtttgacacctatttttcaagctcacattacacttcgttgagaattctaaaaggtgttatctcaatcgttgatattgaccaacatattaaataacatactacattttagcatttttgaattgttatacttactcttctaaagcgagtgaaggcagactataaatctgccttctttatgagattaacaagcaatttttaactgagggtaaattacaccgcgaagttcattcggaatagtgtcttttattacttcaattaaactatctctacttgaaaccaaaagtgctaattcatcaagtaaaatgtttaatttactgttacgatcccattgcgttttatagggtgaagaatttatcttttgatcaactatctgcaatcgtctctcattatcatatatgtacctcgttttcacgatgctatgagaatcttcgatagattcctgatacgtgataattagatgaaccattccatttttcttaatagtttcaatgctttcgtattcgttatcaaaaatagcagtaaccaactcttctggctgaactcccttcaccatgcaaaaggctattattttattaataatatcttttattttcaattggttagtcatcttatcatcctctcaacttcttttaaaataccgggcaacgcatctatagactgtagcagagttttattatcacgctcatccacacgcccaaaggcttttgacaattttaaattaatataacgcatcaagataccatcattggcgtccgttggtgctatatactgcatatgacgaccaaaaatatcatatagttctgaactcttctcaccaatacctttatcattcaatagattagcaacttcatcttgggttcttgtcttaaggatttctcgcattctttttcttgcgatatgtggtcgtttttcaattagctcaggatctataatatcagcaactttacgcgcctcctcctctactaatgactttttcaacccttcaattgctgaatcggataatgtaataccagctaatcttattttttctatttggctagaaacagcttcacttatttcagctcttttctgctcaaaaagagcattaaaatcgatatcatctaaatatgaatcggtttcacttacatacgcaccatcactagcaattcccgctagagcttgctctctctcaacataatcacgatcgctaaatatatattctctaacactagctctttttgccctgtccacttccttttggaaagtatcccacattacatttagaccaatttcctcatgaaagataaccaaaccattattatctatttcaaaagcagcaatctcattatctggtatggcccttaatatacgccctacaacctgtgcgaatgcattaagacttctatatggtctaaatattgccaatatacttaaatacttatggtcatacccctccattagcatatttactgatataaccacatcacaattattattgtctatctctttaaacgaggtggcgattctttcaggctccatctcactatgaattatagtagctctcagccctttttctgtataccacttatatagatcttccgcatgagtgatactacaccctacagctaatatcttatgtggcacagaggttgatattttttttagctcatctaaccgacggatgctatgttcaatcacatctttagagcattcctctgataacgctacgctcttttcaatccattctttatctttaagcgcaagaacatcatctttagataacttaacacctggcatatctggcgtataaaagaataactcactagcattaaccgtttctttccttagccatttaacatatttatctttcatgacctcagacaatggcgtttcatgtattttcactccgggaacttcctgattatccccccgataaggcgttcccgtaacatgaagaatcttagcattagaaaaatattgtattgcgtcacgccagctttgtgctggggcatgatgagcctcatctacaataattaaatcaaagtaatcaggagcgactcgattaataagagttgtacttctattaccagaaattctatgaatattagaataaacaatatgactactttctaagtgttcatctgatatatctgaaacatattcatttacaatcggaatatctttactgctaaacataacatcgcaattaacccaaaaattatcttctaacacttcttgggttttcctgatgctgtctttcgtaaccaagccgggtgtaataattaatactcttttctctgacacaccatagggtgcaatcgatatcaacccactttttcctgtacctgtaggcaacacaaccaaggcctcacgattttgcggatcgctaaaaaactccctaatctttatgtatgcttctacctgtggtgttctaagctttttatttccttcaatattcactgctgtgtcaaaaaagtaagacatttatcttttccttgattacaccaaatataatttatatgaataccactgcaacatatctcttcgcttttcaagatactgtgcatgattataagtaccgcgaatactattcttatcaacgtgagccaattgtagctctatccatgcactatcatagccttgctcatgcaaaatcgttgacatggtatgtctaaatccgtgacccgtcgcacggcctttataacccagtaattcaatgacctgattgactgtttctttacttataggctttttacggtcatttcgtccaataaaaatataaggataatgtccggtgataggtaagagctgtttaaatagcgctataacctgcgtagacaacggcacgatatgagggcgacgcatcttcattcgttctgctggaatctcccacaagccgctctcaagatcgatttcctgccaagtagcaaaacgcatttccttagttcgtacacccgttaaaataagtatcttcgcggcgttcttggttatgatgctgccggtataaccctctagatcacgaataaaatatggcatctcttcggcagacaggaacgggtaatgctgtttctttggcgtacttaatgcgctggcaaggtcaggggcgggattatatgcagcccgaccggtaataatggcataacgaaatacttccccgcagcgctgacgtactttgcgcgttttttctaacgctccacgcttttcgatacgttgaagcacatcaagtaactccagcggtgtgatttctgcaattggccgtttaccaatatacggaaatatatccgcctcaaaggtactcatgatttcttccctatatcccaaagaccaacgatccgctttagctttatgccactcacggctaatggcctcaaaagagttttccgatgaaagccgctgcgctaacttctcagcctttttcacctctgcgggatctgttccatctgcaaccagtttacgtgccatatctcgcttagagcgagcttcagcaagggatatcaagtcataagtccctaatgacattaatcgggctttaccggcaaaacgatagcgaaagcgccagcctttgctgccattaggttcaattaagagtgatagcccttgcccgtcactcagggtataggctttttcttgtggtttagcacggcgaatctggatatcggaaagtggcatgtgtatagctcaaaaaggtatagggtaattctataccctttactatacacaattgttacgaatttagagagataagctcggacacctacggacaataaaacgctctatctattggttttactggggtttttaggactttcggggagtaatacggaagagctttggcggaagatcacaggagtcgaacctgccagggaccgctggcggccccatctggatttgaagtccagccgccccaccgggagcgatgatcttccatagataatctttatgtaagctagcgattataacgcgtttattcaacaaggtattagaaatcagtcaggcattttcaacattgttaagttgagcagaaatctgcgtaacccttggtaaaagtgagtttttctccgtatggcaaccatacaaaagcctactgttggcagcctttgcccgtaaaccatggcgacagtctgcccaaatattccccaaatattccccaaattcgctgcaaccttatgaaccagagataatcgcacggcaaattgccccgtggcagctaaagctcaattctggatgagcaccgtaatcattgatataagtgataaccggcgaggggtaattttctgcaaccagttcgctgctggacataggtgcgaccatgattgcaggaaaatcctcttttgccgccgctccgcttctggccgccaagccgattaccgtcagataatagggcgtcggattctcgagccgatatccctgagcagttttgtgcaatatgacgcgctgctgccagatttcatcgggctgcggcacaatactcaacgggcggtaaaacagctttattttggtttgtagcgctacctgtatcgcatcgggaatatcgctacgcggcggtatttctcgcaacgtgtaataaaacagcgattcgcgatcctgaggcaatgttttcgcatccagtgtggcataaatgcggacgatatttttttcacccgaattcaccctctgtatttccggtgaaaccgccaacggcacagaggtgctctgcggagctacattttcgatccacgattgagccagataaggcagagttttattctcattccgaatactcaggttaacgaatccgacatcagccgtataaataactcttgtacgatccagtacgatagcggcattcgccttgtaaccaacgaccatcaaacaggtcaatagcgccattaattgtatttttttcatagcgagcccatccttgcttcaaatcatacataacaggacgctatatcattcctcatatcatcagtaactaatccgccgttcagcatactaattgcagcttatatcagttaatgcatggttattgtcattagcctcgaaataacctgatataaataagtagaaagaggcgaataagttaacgaaagcgaattatttttgatgactggaacgggcctgtgacatgtctaaaaaacagaaattaggcagaaaaaaatatttaaaacaacaaattacctacatcaactcattcagatggcgatttcataatgcggtgaaacccccaaactctttagcccgcagttatctacgggcatagcttgatcaactgactaatcttcttttatcaatacgctgtaatcctatagataacaacatgctaccacccaacgcgaaagcgaaaacatagaaaatatccagcgccggataggcggtaaaatcaaagtggtgggtgcgcacaaagtgaataataagcgcgtggaaaccataaatcgcaagagaatgacccgaaagccaggttaaccaggctcgtggctgggaaaggcagtttttaaaccagattagcagagacaccgccgcaataaagaccagcggactacagtacatgtagaaggtatctgcaaaatttccattgataatactttgtttttttgtcgaaatgacgatcaatcctacgctcacgataaaagcgaacgctgctgcccaacttatcgattttccttccgtattcagcataccaatcgcccggcctagcattgcgtatagcaggtaatagaaagtatctccggagatatacaggtttacaggcagtaaatggaaaccatcgagagagaacttaccggtataaggattggcaaccaccgccagcaacagtatgactacggcaacgtaacggccggatacaggcttgacgttaatcagcggagaaaccagatacaccacgattatggcgtagaaaaaccacaggtgataaaacaccggcttttgcaaaatattctttaatgaagcccagccgcctatcggcgtcagtgtggatatataaattagagcaatagcactataaaaagtcaggcatagaccgatgcgtataaaatgcttcttaccggcacttttttcacccaaaaacagataacccgaaatcataaagaacaaagggacgccaacccgagacatggaattcagtaagttagataaatcccagctgaattcaccgaccgctgctccgctggtgagatagtaagtggtggcgtgaatcataaccaccataatgcaagccactgcccgcaaattatcaatccatccaattttattggtcatgcctattctctgttgctcatgcatttgggccaaaaaagttaacgataagttatatactaagggcgctaaaagtaactcaaaaagaaatactcgcccaaggtaattaagaatctacctgcatgtaaatcgttgccattattcattattggcggcaaaatagccgtcctaactcgtctcgacagcttttctcgctgaggcagttccacttttcttattaattattaataacttaatctatgcaaactacgttaacacccgcgaaacctttaggccgccgggcgctgttgtttcccctgtgtttagtcctatttgaattcgcagcctatattgccaacgatatgattcagcccggtatgctggcagtcgtcgctgatttcaacgccagcatagaatgggttcccacatccatgaccgcctatttagccggcggtatgttcctacaatggctgttggggccgctttccgatcgccgtggccgtcgtccggtaatgctggcaggcgtggctttctttgtcattacctgtctggctattcttttggtcaataccatagaacaatttattgctatgcgcttcctgcaaggcattggcctgtgctttatcggcgccgtaggttacgccaccattcaggaatcattcgaagaagcagtatgtattaagatcaccgcgctgatggcaaacgtggctctgatcgctccgctacttggccctttagccggtgcagccttgattcacgttgcgccgtggcaaagtatgtttgtgctttttgcggttctgggggcaatttcgttcattggcttatggcgagcaatgccagaaactgcggtgttgaaaggtgaaaagctctcgctttcggccatgtggcatgattataagcaagtgctggctaaccgtcgctttctgtgcggagcattggcattaggctttgctagcctgccattgttggcttggattgcacaatcgccggttattttgatcagtggcgagcagctatcgacctttgactatggtttattgcaagtgcctattttcggcgcattaatcattggtaacctgacgctggcgcgtttgagtggtaaaaccagcattcctaaactgattaaactcggcgcaggcccgatgatcggtgggttgatattggccgctgtttcaacgctttattcatctcacgcctatttgtggatgacggcgggtctcagtttgtatgcttttggtattggtgtagcaaatgccggtttggtgcgtttgaccctgtttgccagcgatatcagtaaaggtacggtttctgccgcaatggggatgatcagtatgtttgtcttcactttgggcatagagttggcgaaagtcgcctatctgtggggaaacagcggtatcttcaatcttttcaatttaatcagcggcctgctgtggctgtcgctggtagcaatatttattcgtaaacagcctgaagctgtagctgcggaataataaacctggcactgatgatgtgaacagatgggttcggctaatgctgaacccatttttaatggtcatggaatctataaagcatcggtaggaatgtattcatcacaaaatacatcactattgatgtgtaatctggtagttacatcagcaccgatgcactaacaaaacatacctcggtcgcgcagaatatggtcgttgccacggcggcgggtaaagccgctgcgatcgaaaaattccagaatttgaatcgctaacttacggccgacgccaaggctgtcgcggaaatccgctgcgctggcgctacctttgctggcatccagagtacgaatcaaatcggcaaactgatagattctgcgattcagatagtagcgatccggcacaatcgcggtgatatggcccaaacgcgcggctttacgcaataatccacgcatcgactcttcatccatttccagcgctacggccagatcccgcacccaccaagggtcactttcaaaataaacccgcgcacgcagccactgtttttcctcttcagctgtaaacgccaaactgtgttcaggtaaatgcagccagccgcgcgtattcgctaattcgccgtcggcaactaattgatcgataacccgattaaccaaagcctcatcaagcgtcggtaaagccatgcggcgcaggcgggcgcggcccaagcccaactgatcgctgtgctgctgatggtaactggcgagcacttgcagcaggttttgccgggcattttcagccatcgcagaggaaagtacgctatcgccagccactaactgttggctgtctgccaatagtttatcgagttgtccatcggataattgacgtgcccaggcaaactgttgaatcgataccggccttttatccaattgaaggttaaggacttccgcatctgtcgtggcctgagctagcgcagtcagccacgccaaaaacgccggctgccgcttacctcttttcggggaagacagagcgatgactcgagcgccacccagggtgtgctttgccgcaatgtcacgcaggataaagcgatcgttttctgccagatacagcggtgtatccagcaataattcggccaacatcggggtttctgcgccattcagcatggaaactcgaccggtaatatggctagcaccttgatgtaaatgcagagattgccaatgatgcatcggtgtatccgttgtgacttccaccagcacccgatcctgcgcttccggcggctgtcgctccaatagccaatcgccgcgagaaatttgctgtttgctggtatcgccagtgatattcagcgcaatcctttggccagcctgtgcatgagtggctggctcattctgcgaatgaatacttcgtacccgaaccggacaatcgctgccggttaaccacagagtatcgccaacggctacttgccccgctagcagcgttcccgtcactactaatcccgaacctttcaggctaaaagcccgatcgattgccagacggaaccgccgttgaatacgttgagcatcgctagcctgctggctaagctgcgtcagatgagcgcgcagttcgtcaataccgactccgcggttagcagcggtgataaacagggaaatctgatcggcagcccagccttgctgtgccagttcggtcaaaacctgctggcgaacctgctcaatctgttgctcatcggcacgatcggctttggttaacgccactgtcagttttggatggccactgaggcgtaaaatggccaaatgttcatgtgtttgcgccattacgccatcgtcacaggccactaccagcagagcgtgatcgataccgcccattcctgccagcatattggacagaaacttctcatgaccgggaacatcaataaaaccgagactactgccgtcgggctgtggccaataggcgtagcccagatcgatagtcataccacgctgtttttcttccggcaaacgatcggcatttacgccggttatagcctgtaatagcgtggttttaccgtggtcaacgtgaccggcggtggcaataatcatcaaacaagctccctgagcaaagcatcttcatcatttaaacaacgtaaatctagccacatgcgcccatcccgaagatgaccgatcaccggctgattcagacggcgccagcggttagccagcgacagcagcgtactaccccgcccgtctttaggtgtgaaagttatcgcccaactgggcaaacgatcgaccggcaaggaaccactgccaatctgcgaccagcattcttcgctggcaaggtcaaaatccggataatgcgcgctaagctgcactaataggcgctcggcgctgtcacgcatctcttgctgcggacgagtgagtatgcgcagcgatggcagtaaatctgccaaccgatccggttgttgataaagacgtagtgtagcttctaatgctgatagggtcattttatcgacccgcagagcgcgtttgagcgggtgctgctgaagtttggcgatccagtgctttttgcccagaataatccccgcctgcggccctcccaacaatttatctccggaaaaagtgatcaaatcgacgccagcggcaatcagttgctgcggcattggctcggcaggtaatccgtattgggtcatatcgattagcgaaccgctgcccaaatccgttgccgtcggcacagaaaattcctgccccaaggctgttagctgagattccgttaccgcggcggtaaagccttgaatactataattactggtatgaactttcatcagcagaccggtattttcgccgattgcctgccgataatccttcaaatgagtgcggttggttgcgccaacctcaaccaattggcaacccgcctgacgcatgacgtcaggaatacggaaagcgccgccgatttccaccagctcaccacgtgaaaccacgacttctttgcccgccgagaccgccgccagcatcagcagtaccgccgccgcattattgttaacaatacaggcgtcttctgcgccggtcagttcacagagtaaatccgctaccgcccgatcccgatgcccgcgtccagcgtcaccgaggtcatattccagcgtcaccgcgccgcgcatcgccgccgtcactgcgttaatagcagattcagccaaaggcgcgcggccaagattggtatgcaataccgtaccggtcaggttgaatacgggtttcagggcgggttggcgttggttaatccgttgacgtagttcggtaatccagcagctatgccagtgcggcagcgtctgagtctggcggataatctcgcgggcctgcgtttgcattttccgcaggatatcagtgagtagcgtcgcgccatattcatccagcaaaggagccatttctggctcccgcaacagacggtctatggcaggtaattggctataaagttgctgaggttctgcgctcatagtcactcaaatcagggagataacggaaagttattcgccggggaacaggaacggattaacgctactgcgggcgaaaccttctccttccattttggcatccagaatcagcgaggccaaatcatcagccaccgcttcaacctgcggatctttttcctgatacagaatttttagataagtgccgcaatcaccacaactttctgcttttaccgctgccagttcgctatccagtgaccaataattcagatcgcggctttgctcgcagttactgcattttatccgcacgacgtgccattcgctttcacacagattgcagtgcaggtaacgcaggccgttcaccgtaccgatatgcaccacgctggaaaccggaatactgccgcagaccgggcagaactgacggtgttcaccatattccgcacgagctttaccgggaatctggctggccatttgcgcccaatacagcgatagcgccgcccagataaacggggatttctcactgccgatcttgccgaattcgcgattcaacaatgcgtcagcgtagagctccagctcatgtaccgatgatttttccagattatccagcacgacctgaatatgctcaggcgcatctggacgcagttcggcaatcagcgccgacagcaacaaacgccagtgctcagtacgaggaaatacgctcgcatccaacggcggcttgccgctagcggccgagtgctccagctccgcccgcatatccaacgtcagcgggtgatcgtgcagcgctttttgctgcgcttcggtaattctggcggcaaaatccagataatcagacaacggattatctagcgccagttgccgtaaacgttcggttcggcgggtatacaggctttttaaattcgcgaaaagtaacggcgggattgtccccgccgttgatgctctttcgctttgttgactaagttggtccttagggacaatgcgaatactcatttcagggtttctcttcctgttttttctgacggatttcccgataccagcgcggatggtgctttttcgcccatgccgcaggtacccagccttccaccatcgccgttatcgtgcctttcacccaaatggccgcataaatgtgaaccatgatgacgatgatcagccccaccgctgccaatgagtgcaccagtaacgccaggcgaatcaatggaatcgggaaatactcggcgaagtaaggccgccagataaccacaccactggccactaacagcaccagacttataattgctgcccagaatacgcatttctgaccaaaattatagcgtcccgtgtcgcccacttcctcattcatggcaattttgtggatatttttcgcccagaccaggtcttcgcggttgatcaggttgtgtttccagtaacggaaaaacatgatcataaacgcagcgaacataatcaccccggcaaagggatgaagaattcgcgccagctgcggcgtaccgaagatgttcatcagccagttaaaggaagggaagaagaatcccagcccactaatggccgccagcataaagcagaaggccactatccaatggttgattcgctccggtgcgctgtagcgctggatcggcttttcttttttcatttccgcgtctccccgtcttgctgttcggaagatggctgagtagatgacgatgaatctgacgatgcagggacggatttatcctcttcatcctcatcttcttccacccggttcgggccaacgccaacatagtggaaaatactggcggcaaaggtggcagcaaagcccaccgcagccaatggtttccaaatgcctttccagaaggtaaccgtcgggctaatggtcggattttcaggtaaaccgtggtaaagctgcggtttatccgcatggtgcaacacgtacataacgtgagtaccgccaacgccagccggatcgtataaacctgcgttatcaaacccacgggttttcaattctgccacgcgcccagccgccacttccttcatcgactctttagtaccaaagtgaatagcgcctgtcggacaggttttcacacaggccggttcctgacccacattaacgcggtcaacgcatagggtacatttgtacacccgattgtcgtccttgttcatgcgcggtacatcgaaaggacagccggcaatgcagtaaccacaaccaatacaatgctccgattggaaatccacgatgccattggcgtactgaataatagccccttccgacggacatgccttcaggcagcccggatcggcacagtgcatacagccatccttacggatcagccattccagcttgccgttttcctccacttcggagaaacgcattaccgtccatgatttagcggttaaatcggcggggttatcgtacaccccgacgttatgaccgacttcatcacggatatcattccattccgagcaggcgacctgacaggctttacaaccgatacaggtggtgacgtcgataagcttcgccacttcagcctgatagttacgatcctgcggcggtggcgtcagggaatgagtaccggagcgccgaataatgtcttgagattgcagtgacatagttgttctccgttacaccttttccacgttaaccaggaacgccttgaactctggcgtttgcgtattggcatcgccaacgaacggcgtcagggtattagcaataaagccttttttcgctaccccttcataaccccagtgaataggaataccaatggtatccacttcctgtccgtgaaccctcagcgtgcgaatacgtttggtcactaccgccttagctttgatatagcctcggttagagctgactttcaccgtatccccgtgcttaatgcctttcttctcggccagtttttcaccgatttccacaaattgctccggctgggcaatagcgttcaataacgcatgcttagtccagtagtggaaatgctcggtcagacgataagtggtgcccacataagggaattgctcatgggagcccatactttccaaatcgtctttaaatacgcgagcggccggattggaaatcacgttcggatgcagcgggttggtacccagtggcgtttcaaacggctcgtagtgttccgggaacggcccttccgccattttgtcgatggcgaacagacgccccatcccttccggctgcatgataaacggcccgacatcactgcctggcgcggcggcgctgtagtcagcaacatcgactccagtccatttcgctccgtcccattccagcagctggcgtttcggatcccaaggtttaccctgtgggtcagccgaggcgcggttgtacaaaatacggcggttcaacggccatgcccatgcccaacccagcgtattaccgaggccagacggatcggcgttatcacggcgtgccatttggttacccgctggcgtccagctaccggcaaagatccaacaaccgctggcggtagtaccgtcatcgcgcagatgagcaaaggtactcaattgctcgccttttttcaccagcactttgccgtcggcatcggtaatatctgccaatgcgcgaccgttgctttccatcgccacttcttccggctctggattgtctggcgtcaggtagtcccaggtcatattgagcacctgttccggcaccgcaccgccttcacgctgatacatctcgcgcaagcgcatcagaatacccgccagaatgccaccgtcgttcatggcttcgccgggggcgtctgcgcctttccagtgccattgcaaccagcggccggagttcacgatagagccgttttcttcagcaaaacaggtagatggcagacggaacacttcggtctgaatttttgacggatcgacgtcgttaaactcgccgtggttctgccagaaattcgaggtttccgtattcagtggatcgatagtgaccaggaacttcagtttggacagtgaagctattactttgtttttattcgggaacgaagcaaccgggttaaaaccttggcacagatagccgttgaccttaccctgcgacatcatctcgaagtactgtagtacgtcgtagcctttatcccatttaggtagccaatcgtagccccagctattttccttctgcgctttatccccgtagaaacttttcatcatgctgacgaagaatttcggatagttactccagtagttcacctgacccggcaacagggttttcggcgtattggcagcaagataggtttccagatccggctgtttttcggacggcaggttcatgtaacccggcaggctttgcgacaacaggccaaggtcagtcagaccttgaatattggagtgaccgcgcaaggcgttaaccccgccaccggccatgcccatattgccgagcagcagttggatcattgccatggtacggatgttttgcgcgccgacggaatgctgagtccagcccagtgcatacaggaaggacgcggttttatccgcagcactggtttcggcaatgtattcacaaactttgataaaatcttcctgcggcgtaccgcagatattgctaaccacttccggcgtgtagcggctgatatgttctttcagcaggttccaaacgcagcgcggatcttgcagggtgacgtcccgtttggcgtagccgttttcatccaactgatagttccagctggttttatcatatttacggttatcggcgtcgtagccgctgaacaggccgtcttcaaaggcaaagtcttcccgcaccagcaggctggcgttggtgtaagcctcgacgtattcgcggttaattttttcgttggtgatcagatacaacagtacgccggataggaacgcaatatcggtaccggaacggattggcgtatagaaatcagccaccgatgcagtacgagtaaagcgcggatctatcacgatcagcttggcattgttgtggatcttggcttccatcgcccagcggaatcccactggatgcgcttcagccgcgttaccgcccatgacgataactaaattcgcgttcttaatgtcaacccagtggttggtcatcgcaccgcgaccaaatgttggagcaagacttgctaccgttggtccgtgtcagacacgtgcttggttgtctacggcaagcatgccgagagcgcgactgaatttttgagtcagataacccgtttcgttactggatgcagaggcacacagcataccggtgctgagccaacggttaacggtcacgcccgcttcgttggtcttaatgaaattcgcatctcggtcttctttcatcagtttggcgatacgagtaaaagcatcatcccaactgattcgctgccatttatcggagcctggcgcgcggtattctggatatttaagacgactttcgctgtggataaagtcaatcaggccagcacctttcgggcaaagtgcaccacggttgaccgggtgatccggatcgccttcaatgtggaaaatactctctttggcgttttttgcaccgtcgccgaggctatacatcaatagcccgcaaccaacggagcaatatgtgcaggtattacgggtttcgcgggctcgcagcaatttatactgtcgcgtttccgccaacgccaccgccggcgcaaagccgagtgccgccgccgtggttcctgccataccgccagcgcagatcttaaagaactgccttctgctgacctgcatgggtctctcctcaattcacgattgtcacagtgtttttaacaggcgctttccccgataaaggcgtcagcgctaaaatcgttatctcactaccgctttgccgcgatagagaataaggttcacagccttatccttaccgtggaatactaccacactgtcattatgggatataacactcaggatcgcatcagtgagccagatcaaaccagcacaaacagccaattcgaccgatgtttgcggtgccagacaactcaagctgtggcagcggcaggacttaaccaccactcagcccgactggctggcggaagaagtgcctattgctctggtatataacgggatttctcatgtcgtcatgatgggaacgccgaaagatctggaggcttttgccctcggtttttccttatcagaagggattatcagtcgcccgcaggatatttacgctatcgacgttaatcccacctgcaacggcatcgaggtcgcaattgagctatccagccgccggtttgccggtttgaaagaacgacgccgagccatggcgggccgcactggctgcggcgtgtgtggcatcgagcaactggccgatattttccgcccaataacgcctttgcccttcagccaacgttttgatttaaaccatttggatagagcattggggcagctaaaacaggtacaaaccgtgggccagctcaccggttgcacccatgcggcggcctggattaacccagaaggcgaattattaggtggctgcgaagatgtcggtcgccacgtcgccttggataaacttttaggactacgagccaaacagccgtggcagcaaggcgcggtattggtttccagccgcgccagctatgaaatggtgcagaaatccgccatgtgcggcatcgagattctatttgccgtgtctgccgccaccacgctagccgttgaggtcgccgagcgttgcaatctcacgctggtcggttttagcaaacccggcagagccacggtatacactcatccgcagcggttaatctaaaggcggtggcttttattggctcaatactgagttaaagctgcacatagaggatcgaaccacgcggtgaccttatttcgctttagtgcggggaagagggggcagcagagaaagccatcattcttgagtgtgaagcacaaaaaaaaagtgcccgtcgtatcgaagagtgattgaattaaaaagaatattaaaagtttcgtcacacattcattttatcgagaacacgcagtaaccacacaaaaactacggcattgataatcattttcaatatcatttatttaactataatgatccgaatgcttacgtggcgctcactttttttgcgccgctctacactacggagacgatgaatatgagttactcactgccatcactgccttatgcttacgacgcactagaaccacatttcgataagcagacgatggaaatccatcacaccaaacatcatcagacttatgttaacaacgcgaacaccgtgctagaagcttacccggagctggctagcctgagcgtggaagaagttatcaaagacctgagcaaagttcctgctgacaagcgcaccttcatgcgtaacaacgccggtggccacgctaaccacagcctgttctggaaaggtctggcgctgaacaccacgctggaaggcgacctgaaagccgctattgagcgcgatttcggtagcgtagacaaattcaaagaagaattcgaaaaagctgcggcaacgcgtttcggttctggctgggcgtggctggtgttgaaagacgacggcaaactggccgtagtgtctaccgctaaccaggatagcccgctgatgggcgaagcggtttctggcgcatctggcttcccgattctgggtctggatgtgtgggaacatgcttactacctgaaattccaaaaccgtcgcccagactacatcaaagcattctggaacgtggttaactggaacgaagcggctaaacgtttcgctgaagcgaaaaaataagcccgattagccagagtcagcgcgggtttccgccctttctcgctaatgaccatgccggcagctggattgccggcatttttttgcctatagaattcccgctgatggcgcagatacatcctaagcacatcgctatttccacgagtatctcccccatctcaccgcagggaatagcaccagaacggctattaacagcgctttttattgctaaagtttaaccatgagttgccgatagattgtacaagaagaactattgcccacatcgctattgagaaacaaagcctgagttaaacaggctagttactgctcaatagttaaaccagcaataatcattccccaaataactagacccttccctgaattcaccagcgctgattgatctgtcttaggaataccgcataacggagaatagtatggctgcaatgagcaatttatttggaagctttgagaacgtaaaagtagggaaaaaactgggattaagttttttcattatgctgctgctggttagcatcatcgcaggtaccggggcttaccacttttccgagatcgaagcgcgcgcctataaggttgacctgagctatcaaattaacgatgaagtgaaccaggcaaagtacaatcgggcgctgtacgaacgatcttacgatcccgcgtttatgacggttaacgccaaacatatcaataatatccttacactgttggcgcaaaaagagaacatgaactggagcgctgaaaaccgcaaaaacatcgatcgaattatcgaagtgattaaagcctatcagctggaacagagagagtttctggctacggttgaacgaaaagataacgtccgcaaaagctggaacatttctgaaacccagaaatacctgaatcagcttgaacagaacttcctgaatgaaggggcagataccaacacccgcatcctactggcagaaatgaaccagaaactgatggcggtacgctataatgcccgtgggctgctgctggatcgtaatcaagaggcagaagactcgatgattaccgcgattgatgtggcgcaaaacgccgccaacgcattcctgccggtactgtctaccgaacaacagaaaatgatggcaccggttatcgacagtttgaaagcctataaagcgaatattctggcttacttaccggcttacgaacaggaaattgccgcaggaaaacagttagaaactaaagctatcgagctgaattctctggttaaaaatctgtttgttcaggagttacaaggcactcacgatgaaatcgacaatgcgcagacgcagatgaccgttgtcgcaatggtggcgcttttagttggtttgttaatcgcctggcgtattacccgccagattaccgtgccgttgcgtaccacgctggcgatggcagaacgtattgccaccggcgatctgaccgcggccaccacctcatctcgttccgatgaactgggtctgttaatgaacgccgtggcgcgcatgaatgaaaatctgcgcagcatgattgatgatattcgcattggcgtcagtcaggtttctcatgcctctggcgagattgctgctggtaataccgatctatcatcgcgtaccgaacaacaggccgccgcggtagaagaaactgccgccagtatggagcagctaaacgccaccgtgaaacagaacgccgataacgcacatcatgccaatcagttagccaccgaagcttctgataccgcgcagaaaggcggaaaactggtaaatgacgtagtgcgaaccatgagcgatatttccagcagctctaagcgcatctctgaaattacctcggtaatcaatagcatcgctttccaaaccaacatactggcactgaatgcggcggtggaagcagcgcgagcaggcgaacaagggcgcggttttgccgtggtcgctagcgaagtacgcaatctggcgcagcgcagcgcacaggcggcaaaagaaatcgaagggctgatcgccgagtcggtttcacaggtcaataacggcacttctttggtgcaaaatgccggtcaaaccatggagaatatcgttcgttcggtgacacatgtgcgcgatattatggcggaaattgcctctgcttccgatgaacaaagccgtggaattacgcaggtcagccaggcgatatctgaaatggatagcaccacgcagcaaaacgccgcactagtagaagaatccgctgccgctgccgattcgctggccgagcaggcgattctattggcgcaggccgtcgccgtattccgtttatcggaaaacacggaagccgacgattcggctcaggttgcgactaacacatcgccagccgcatctcgtccggcatcagataatgtaaaaacaaatcagcaggataactgggaaaccttctaatcctcgcactacgggagccgcttcgcgtggctcccgtccattcactcataccgattaaccctaagttatccatacaattttgccattggtagccagactgattgcaaggtattctgaatcttaccccgcgtaagcagacaaggagagcttaatggtttatccgcaggtctatatcggtaatatcgagccttaccccggcagcagccccagcgccattggtaagcgccaaacggacggcagcctgatgctgaagccgttaggattagaaggtgatgagcaggctgaaacacgctttcacggcggcccggatcgcgctctgtgccactatccccgcgaacattacgctcattggcgccagcaatttccagaacaggcggataacttcaatgcacccgcttttggcgagaatatctctacggaaggcttaaccgaacagaatgtttatatcggtgatattttccggtggggagaagcgctgattcaggttacgcaaccgcgatcgccttgctacaaactcaattttcacttcgctattgaggatctttcggtattgatgcagcaaaccggtctgtgcggctggctttaccgcgtgatatcaccgggaaaggtgagtgacgaacagccgatggcgctagttacccgttgctgcgatatttcggtcgctgaggcgattgccattgctttccatatgccgtttgatgaagaagaatatcgccgtttacttggtgccgccgggctgtctgctagctggagcaaaaccatggtgacgcgattgattcatggcgaaatagagaatttcaatcaccgcctgttgggccgggcgagagcctaaagatttgatctgcgtgtttcacaaaaaacatctagatatctgactaatacattagaaaaaaccgggttgatagcatggccatcaactcggtttctattacaccgctgataaaaatcagaacgcttttttcgcgtaaccggtcacttctttcagccccatttcacggcctagcgccgtcattgggtgcaccacgatcaaaccacgagccacttttttcagtgaacccatatcggcctgttcttttttggtgatggctcggctgaatggcattttggtcaattcctgcgcctgaacgctcaggttttttacccgaacctctttcaaacgctgaatttcagcagccagtttttctttttctttcatatgctgggcgatcaaatcaacgttaccctgttgaatgactgcggtatctttgtggttcaatgcatccagcatgtcgctcagacgtttgatttctgcttgttctttcataaagttggcccgtacatgccactgatgggcacgaaaattcgctaaagttggaaataggatatcacctatagtgtatcaggatgcgcttctttcgacagcccgcacctgagcagatcaccagccaacgcctgcgggtaatccactgatctcacaggctgccgctcctaccaccgccaaagcctgggtataactatcgttaaacggatagcagcatgacaggcggaaagcgtgacgatagcgcccgctgggtgaatatagcgtgcccggagtcaggcaaatatgctgttgcagcatttgatgatacaacgcaacggtgtccaccgagggaggcaattctacccaaaaaacgaagccgccggcaggtcgggtcgctttcgttcccaggggaaagtgtcgattaatcaagatacgcgcctgctccacctgagtagcgtagcggcggcgcaatccgcgtaagtggtgatcataaccgccggactccaaaaacagcgctagcgtttccgataacaacgccggttctgccatcgaagaaacggcttttagcttgtgtaacgcttcggaaaaacgaccaccgtcaatccagccgatacgaaaatcaggtgccagcgtttttgtaaaactagagcaaaatagtatccaaccatcccgatcgaaagctttcaccgctggcgacaaactgctgccaaactgaatttcagcgtataaaccatcttcaataagcggcacctgatgatcgttcatcaggcgggccaaccgttttttggccgccaaaggcattgtgtaaccaagcggattttgcaccgtcggcattgcaataaccgcattcagccgcccttcctgaagcagcaattccaacacatccaacgataacccttgcagcggatcggtcggaatttcaatggttcgcaaacctaaactggctaacaatggcatcagatagaaataggtcggcgattccagtccaacgcagtctcccggtttagtggtgacacgcaacgccagctgtagtgcctccatacaaccgtgagtaatggttatctctgcaggatttgtcaccatccccaaagttagccctcgacgagcaatttgctggcgcaaacgctgactgccaggtggtaatgcgtatttgctgattaaatccggctggcggcgtagcaaagaagccatcacacgccctagcttggcgctgggataaaaatcagatgtttgtgggcaagccaatgaaatattagtaaaagccgggttggactgagcggcaaacaccgtttctatcaaatccagcacctcgtccaccggtttactagccgaaaccgttggcaccagcgcactggaaggagtgcaaacataaaaaccggactgcggacgtgcctcgatcaggccacgatcttccaacgtacgataggcggccaccacggtattaatgctgacctgatggctctgggcgcagcttcgcaccgacggcaagcggcttcccgcagataaactgccattatctatcgctttggttaacccatctgcaagttgtaaatagcggattttattagtaatagtagacatagtgacaattctccactgtttcgatgggtacagtttaaagtttgctttactgtacccatcagaatagagaacttctggttctgccgccaccgtccattgctggttatgctaattcctttgttttatttcactgaggaatccccatgctggatagcgcatttatcagttatgtcaccgttatgtccatcacgcccggtccgaataatctgctgctggctgcatccggcgtcaatttcggcctgcgaaaaaccgtacctatgatgttaggcgtgaccttcggcagcgcctttcaatgcgcgctgaccacaacgctattggcattggtactaagctgggccacggtgattcgcctgcctttggtgacaatcggttgtgcctatttactttggctatcgtggaagatttatatgtctggcgcaccgggaagccgggaaaaacagcagccaatgagttttattcaggcctcactatttcaggccatcaatcccaaagcctggctgatgagcatcaatgtcgcgattctatttacccctagtcccggagaaatgctcagccacacgctgctactggtgagcgggtttgccttactcaatttgccgtgcgtgggcgtctgggcagtcatgggggataggttgcgtcatgccctcacggtgaactggaaattgcggttatttaacgggttaatggcaggaatgatggcaactaccgccctgtggctattagtcgatgaatggatggcggtctaccaataaaaactcaggaaggcagaatcggcgacagtttagacactttctttaagctgatacgggaaatgaactcggtaatcgacaagaccatcgttgaacgcaaaacctgctgatagcgttggtgttgcatagcaataagagaaggctcggcttcttctggtgtgagaaatgtgggaacgggcggtaacgcggttacacagtgcaactccccaaaggggccgagaatctcatcgtcggtgaaacgatattccgcgccgtcgtggttcatttcttcacgcagcgccattaaaagttcggcatcttcatattcatgacgtgaaatcacgcccaaggcataaaccagcttcaaacgcacagataattcgcccaagggaccgtcaacaattaatagcggttccacggcatacttcaccgcatagtcgtcctttcggaaaacctgcaccactaaaatgtttaaggcttcggccagtagatcaacggcggcgataaggaaacttcggacggttttaccggcgttaagctgttccagaaccctattttcaaatgcctgtgctttttcaatcatctgttatctactacagtggttggttaatggccatcctgcggactttcccccacgcatttcacacggtcgcagccccgcgacaatgcaaaatctactgggttataccccactcactgagataaataccctgttgttaagccgatatttagagcagaaagactcgtccctctgctcttatcatcattaacaagcatccgtggttactgacgcggtatttatctcccgactcaggccgggagggcaaatccgttggcatatcccgtcgtgagccgcttttgccagcttaacgcgccaggttttcctgcatggcgttatacacattcaccgcctgttcgacaacctcgctattcgcaggcaggccagaaacttgcgccagtgcagcttttgcgcctattttatccagtaattcgctccattcctgcgcctgcgggtcctgctcactgcgatagctcattgcggcggcaatacctttcaccagattatcgtgaggcagatgatattccagcgtgcccactaacggtttaatcagacgatcgcccgcgcccagcttacgtaacggctgacggcccactcgttcaacgtcatcatgcaggtaagggttttcaaagcgtgataggattttattgatataggcggcgtgtttttcagggtcgaagccatagcgcttgatcagcactgcgccgctctcttccattgcccctttcacaacctgacgaatttcggcgtcaagaatggcatcgcgaatggtctgtaggccagaaagttgccccagataagcggtaatggcgtggccggtattcaaagtgaacagtttgcgctccacaaacgccatcaggttatcagtcagttccataccggcgatttgcggtggttggcctttaaactgggtttgatcgacaatccactcgctgaaagtttctaccgtcaccgccaacggatcggtgctgccttctgcggaaggaggcacgattcggtctacggctgaatcgacaaaaccgacatgttcttccacccagttcttttcatcttccggcaacgcggcccaaacatgctgcttgaactggctggtgccgcgcaccatattttcacaagcgataatattcagcggctgattattaccggcctgatggcgggcaaccaacccctgcgccacgataccggcaatttttgccaaaacctgcggcccaacggctgtagtgacaatatcggcctcggcaatcagccccacaacttccgggctaccgctatgtaccgcgctgacgtttttcacgtcttcaatgcgcgcctgctcaccgacaaccgtgacctgataggatttacgacgattcagttcatccagcaaaggctggttcacgtcagcaaaggtcacctgagctccggcatcggccaacaatttgccaataaaaccgcggccaatgttacctgcgccaaaatgtaatgctttcatagttttttaccttgaatttgccgttggaaaacgggggccattggagaattccggccccgattcgggctgcgcaatttgctgcgcagccggacaacactcaccgccctcaggcagatttcttaccggagagcaggtctaaaacttcctgcacactttctgttttgctcaggcgcgcgatgacggaatcatcatccagcgcattggtcaggctggtgataacctgaatatgctcgttattacgtgcggcaataccgatgaccagacgcgcaatttcatcttcttcatcgccaaaacgtacgccattcgggtattggcagaacactacgccggtacgtaatacgcggtctttggcttcgatggtgccgtgcggtaccgcgatagattcccctaaataagtggaagtcagtttttcgcgttccagcatggcgtcaacgtattccggctcaacataaccccccttaaccaactgctcacccgcgaagcgaatggcctcttctttggtcgccgcatgcagattcaggaagatgtttgctttacccagcttgaatagttgctcttcagaagcttcaaaactgtcatccagggtttcgatcactttctgcactagcggtgcgctttccgcctctttactggcttccagcaggcgagtcgtcagattggtatacagctggctatcgaggaagttggtcaacgaaatgtgctgtgcctgcggggcgtgacgcattgcccgctcagtcagatctcggtgggtaataaccagatcgacatcttccggcaagttattgattgcacagttagtcacggagatatgcttcaatccggcatcctgtacttttttacgcagaaccccggcacccatcgcgctcgaacccataccggcgtcacaagccacaataattttacgcacggtagtcagatcgcccgcggcggcagcagcgttagccgcctgaacgcctttggactgttgcttcatgtcctgcatgcggcgagtcgcttcttccaaattgtcttcatcatctttaactttggtgtttttcagcaagatggctgagaccacgaaagagacagcgaaagcagcggcaaccgcagcaatgttagcgaagtaagctcctttaggcgtcatcgccaatacggccagaatagagcctggagaagcaggagaaaccagaccgccgttcagcaaagtcaaagtgaacacgccggtcataccgcccaaaatcaccgccaacaacaggcgcggattcatcagtacatacgggaaataaatttcgtgaataccgccgaagaaatggatgatggctgcgccgccagcagattgcttggcattgcctttaccaaagaacatataggccatcagcacacccaaacctgggcctgggttggcttcaatcaggaagaagattgatttgccggtttccgtcgcctgctggatacccagcggagagaagataccgtggttgatagcgttgtttaggaacaggattttcgccggttcgacgaagatagaagccaacggcagcaggttatttttaaccataacatgcacgccagcagccaacattttggacaggatttcgaccagtgggccgatcgccataaaggccagaatagccagtagcatcccgataataccggcagagaagttgttaaccaacatctcaaagccgcttttgattttaccgtcaacccaacggtcaaagcgcttaatagcccaaccgcccaacggacccacgatcatcgagccgaggaacatcggcatatccgcaccgacgatgacgcccatggtggttatagcaccgacgacgccaccgcgttcgccaccaactaagcgaccaccggtataaccgattaataacggcaataaataggtaatcattgggccaacaagcttggctaaagtttcatttggcagccagccagtcggaataaataaagcggtaataataccccaagcgataaatgcgccaatatttggcatgaccatattacttaggaatcggccaaagttttgcactttaaccttaatgtctggtgaaagcataaaaacacccctattggtacgcgctaacaataagagcgcgagataattattaaggcggcactgcgaaatccgccgaattgctgtatgcaatttaaactctagcatgggctgtaatgagggcgtaatccgcaaaatatttgtgatgcagatcaccacaaacaccccaaaatagcgtgctaattagtgatatcagtcacatttatgccaatcaattaagtgaaattagtgcaacaattaatcaccacatggaataaatgtgattaagatcacccttagtcccgtctattttgttttggaaatgtgatgtttatcacaataaatttttcatcaaaaaaggaattagaggcgatgttcgaggggagccagacttattaagccgctttaccagggaggaagtatttaaacgtgaattagtcaaatagccagttgagttaaataatattaattaatcaattgaaatttataaataaaaatataattaaagaatttcttaattcagcaatctcgagccaacggatctaaaattgataattaatgagtaaggctgtcacttttacatttggtgagcttgaaatttacccaaggctaacctagggtttaatcataaagaacaaccgattaagcagtaagatttcatttttataaaaatagatctggccagctaatttaagggtaaatgatgaaaaaatattatcttatctgtggcatcggtatacctatgattcttctcaattctgctctggcggcgaccacaacgggcagcattaatgccacattaacgttgactaacggctgtttggttaacaacagtgcagcaaccagcggcctgacattaggtgtcttaagctttggttcattcaccaccaccggatttaccggtggctcggcaactctttcgggagcttcaggtacgggaagcagcgccatcagcgtgaaatgttcccctggtatcacccctgtgctaaccattaccggcagtaatgcagctccggccaacatacacggcactgtgccgtctaccggcccgcgctatctggtcggtacaaccaacacgactcaggcgattgcctatggtctttatacttcgaattcttttaccacaccgattgtcaacgccactacagtgacgccaaccaccaccggcgatgccacctacggcaacctgtataccttcttcggtaacataaccggcgtaaccggcggcactgacatttacccggatatttacaccgatactatcggcgtacaggtaacttattaacgtctgggagaatggagaggctatgtgccatagaaaatggggttttgcattttttatctatcatagcccagcaatattagtatttttggtctttccggtattggcattgccgacacaatcttttcaggtcggggcaattatttccaatggctgcctgatcagcggcactaataccggcgtatttgggcagattaatttcggaacttaccccggcacgtccaccgctcaggtcaacggtacttatacgcaaagctcgactattactctcgcctgcacgcctggtacccttctcaatatgagtattaacggtggagctaattacacttcgacccgtaatcttaaaatcagcggacaatcctatttagtgccctattcactttataacagtacaaccaatgcggctattccggtcaatagcaacgtcgccgtcacctttagcaatgcgaataatattactttgccaatttatgggctgttaactctgaatggaaataactattcagggctttatacggacaccttaacagtgactttaacctggtaataaatacaatgaaaaaaataaacactctcgctaaaaaatgttataagccatttattttattaattttaaccgggttttccttcaatattttcgcaaccaataatgtgttgatttggcctattgacccggtcattcccgccgatcaaaagtcctctagcctatgggttgaaaataaaggcgatcaggccactatgatgcaggttcgtattctgggctggcagcaaacggcgggcaaagaaggttatctcaatcaacaaaacgttattgccagcccgccaattattcgtattgaagccggtaaaaaacagttaattcgtttaattaaacaggtgaatcctactgcagggcaagagcaggcctaccgcattttgattgatgaaattccgactccaacgctttctgccaaagcgcaggaaggtgcaggcgttaattttcagatgcgttactccattccactcttcgtctacggtgatggattggattacggcaatgtggccgcagacaagaatacccatcaaccacagctaagctggcaattggtggagctacagggaaaaaaaatgctggaagtcaccaatagcggtgcaattcacgcgcgtctgagcgatgtgaaacttcagcaaggcggccaaaatcatcaggtggcagaaggactattaggctatgttctggcgaattccagccaacgctggcctgtcagcgtgagttccgccagctcgctgaccatgcaagtcaataatcaaaaaaacgtcaaactcagcatgaagtaatttaatagggacgatcagaccgcatactgatgaaaaactaccgtaattctcctttttgggggctggttatcattacgacaggtttttctggtttttatactgaagcgcgggcagatgaggtgatgtccgagctgcctccaccgccgagcgcgctatcggccgatggggcgattcagtaccagctggaacttgttattaatcaatatgcaacggggcaggtcgtaccggttgagtttcagcgtgggcattatttggtacagggaaaagatctagaacaggcaggcattatcgccgagcacctgacgttcccaacgactgatatcagtaccaatccgaatattaaactaaaatatgacagcgaaaaccaacgcctgctgctcgatgtccctacccattggctgcctaatcaggcgctatcgaataacatgggaaacccaaaatatcaggctgttagcagcaccggagcgttattcaattacgatatttatgcctcccgctaccaaggtaatagccagttggcggcatggagtgaacaacgcctgttcggtactcaaggctacctgtctaattctggggtgataaagcagacgctggccggtgaatctatcgataataacggcggctacctccgctatgacacccggttttcccacttcgacgaaaccaatgccgttcgctggcaggcaggggatttgatcacagattcactggcctggagcaacagcatccgcgtaggtgggctcagcgtttcccgcgatttttctattcgtcccgatatcattaccttcccattgccgcagttttccggtcaggcggtcgtccccacatccgttgatttatttatcaacggcaatatgaccagcagcaataacgttcgccccggcccttttactctgaccaacgtgccttttatcaacggtgcgggagaagcgacggtcatcaccaatgacgcgttggggcggcagatttcggtctctttgccattttatgtcgccagtaccttgctcaaaccgggtttgtccgattacgcattttctatcggagccatacgtcgtggttatggagtggatagttttaattatggctctgccgccgtgagtggctcttatcgctatggcgtaaccaattatcttactctggagagccacgccgaaggtgcggaatcactcgctttgggtggcgtaggcagcgtgtttaaacttgggaatctcggcgtagttaacgcgtcttacagccagagccaaatgcgtggccagaatggcgatcagataagttggggctatcaatataataccggccttttcaatttaggaactcagcagacataccgcagcgatactttcggtaatttggcaatttacgataatcaggacgccaacagtaccaacagcggcagcaataataacggtgcgatttattcccttagccgccgcagcgcacaatactccgccagtattatgctgaatgaattcggcaatctgggtgccgcctacattgacgtcagcggaagaaatgacgagcggacgcgattgttgaatctctcatggagccgcacgcttttctccggtagcaatctatatatttcagccacgcgagatattggtgctaacggttggtccggcgcagtttcgttggtcattccatttggcgcattatccaataccagtatttccagccaacgtagtattgacggacaggctcgtcagcaggtgagctacagccgcggaatgcctagcgatggcggcctgagctgggatctggcctacgctcatcaatccgatcagaaaaattatcagcaggccagcttgaactggcgcaacgccagctttgaatccagcatcggcgcctatggaaataccggagactacactcaatgggcagatttgagcggctcgttagtattaatggataaatcgctgtttgcgaccaaccgtatcagcgacgcttttgtattggtcaacaccaacaattatcccaatgtgagagtgcgatatgaaaaccaactgattggcgtgaccgatagcggcggccatcttttggtacccagagtcacgtcttattatccggctaaatacgagattgataccaccgacctcccggcgggtatccaaatttccaatacagaaaaacggttttcggtgcagcgaaacagcggctatatgattaatttcgacattaaaaagtcaaactcgctcagtttcgtcgccattgaccaacaggggaaaaatctgcccgtttccagtcgcgtgttgaaaaataatcaaacgcgcacttatgtcggctgggatggcattgtgtatctggaagatctcgaagctagcaatagtttgaaaatcatcaccccagacggtcgtcagtgccaaatcactgtgccttttgacgcttcggcgcctcagccggtcatactcaaaagcccgatagtctgtacacttaatccggctcaggtgaattaaatgaaaaaaatcattggtctcgcggttcttactatcggctcactggtgggcggaatccaaagcgctcaggcggcctgtagcactgcgtcaaccaacggttccttcggtagcgccacctcttttgccgtcaataccacggctagcaatacctcgggttccgttacagtaacctgcgcggctctgagcataggcttgctcactcaagactccatcaccttatcgctggttagctccaccgccgtcaacggcacctatgctgccatgaccgccggtggaaccgatacgatcccggtaacggtctgcgcggccgttcctacagcgacaacctgtgcttctccgctgccgttaaatggcgctagcgtcacttttgccggtgccagcctgatcaatctctctttgactcaaaaacaattcactctaccaatttatatacaaacggtgatcggctcaaacgtagcggcgggaacttatacaaccacgttgggaatcaaaaccagctactcaatctgcaccgcactagtctgtctgggtaccgcaggaaataccaacgggcaaccaatagtaccggtcactgtgaccatcatcgtcactaacgactgcacgacgatcaccgcgccgcccgtcagttttggcactcaacccttgctcagcagctttgcctccgtcagtaaccaggctatcaacgtaatctgtaccaagggcagcatttatactgtcagtctggataatgggcagcacgcggtgagcaatgtgcgctatatgtcgaacggaacctcttctatcgcttacgacatttatcagggtgcaaccagcaaccgttggggcagtctggcggctggtcaaagttggtccagcagcacctccaccagtattagcaccgatttactgacgcgcacttttgcctatacggcaacgatcttaccaggccaaaccacaccgccagccggtacgtataccgataccattatggtttcattgtctttttagctgcatataagggaagtcgagaactggtgcaaagagtcgaggaacgagaagaagggaaagcgaaaaagaacaaagggaaaggcgttataccaaacggagtaaattctgtcaggccaccatcattatggcctgacattcactaaactgattattctagagcagcctgaacgcttttcttcgcggcagccatcgccggatacttagccaccagattggtcatcatggtgttgtactgcacggcctgagcctgagtcgggaactgcacgccaccgttattaaaggtcacctgtgcgccctgctgttgcaggaaatcacccacttgcaccaaatcctgcacgaaggcagcaacggtcggaatagcgggaatcagtgtggcagatggctgagtcaccaacttgtcgtaaacctgattgtaaaccgccttcagatcatccggctgtttcaacgccgcatgggcgctatcggcctgatgcttggcagtttgaatttgttgagtcaataaattgagcgtgcctgccgcttgctgtagcgccgcacgtttattcacgtaatcctgcgccacgcgaatttcatcaatctgagtgacggctggagtaaagcccgcttcgattgatttatttaactgctgcgtaaaggtcactaaaatcgcgtaatcaccagcatagttaccgaatttctgcttttgatcttcgctcagcgttggcagtttcatcccgctgcgcatgacggtattttgcagatagtcgatgaaagccttgcgttgctcaggctctttatcgccacatgcagtgagctggaacaccataaacagcgccaaaattgacgttaaccaacgagaataccttgtcgtattcagtgcaaaagccatgtggaattactcctgtaataagcgtttattttcactagtgtccgttcttattacccatccctgaatcaataagaatagcgcaaagggagaggttttctccccctttgctttgaccgcaggaccgttactgtagcagcgagatatccgctacctgcaagaacagctcacgcaatttacttaacaatgtcagacggttgatacgtacggcatcgtcttcggccatgaccatcacgttatcgaagaaggcatcgacgttttcacgtaacgcagccagttcaaccaatgcttcctgataacgcccttcggcaaacagcggctccagctgatcgcgcagcaccaccagatgcgttgccagctgcaactctgcggtttctttcagtaccgcagcgttcacgcgatcgttcagcgtatcgctagatttcgccagaatattcgatacgcgtttattggccgcagccagcgccgctgccgcttccagagtacggaaatggctaaccgctttcacacgcgcatcaaaatctgccggtttggtcggacgacgagccaacaccgcctgaatggtatcaacgctgtggccttcttcctgataccaggcgcggaaacgacccagcatgaattcaaccacttcatccacaaccttgccgttagtcagcttgctgccatacaggcgcaccgcttcttcggtcagggtttgcagatccaacggcaagttcttctcaacgagaatacgcagtacgcccagtgaagcacgacgcagcgcaaacggatctttatcgccttttggatgctgaccaataccaaagatacctgccagcgtgtccatcttgtcggctatcgccagtgcacaagcgaccgggttagacggcagatcgtcaccggcaaagcgcggttgatactgttcgtttaacgcaacggcaacgtcttcagcttcgccatcgtggcgggcatagtgcattcccatcacgccttgggtatcagtgaattcgaataccatgttggtcatcaaatcacacttggaaagcaagccagcgcgcgtagcatggttaacatccgcaccaatttgttctgctacccaaccggccagagcctgaatacggtcggttttatcacgcagcgtccccaactgctgttggaacagcacggtttccagacgcggcagattatcttccagacgctgtttacggtcagtcttgaagaagaattcggcgtcagccaaacgcgggcgaaccaccttctcattaccggaaatgatttgctgcggatctttagattcgatattggcaacgaagatgaagttaggcagcaatttgcccgcggtgtcatacaccgggaaatatttctgatcccctttcatggtgtaaaccagcgcttccgcaggaacagcgaggaatttctcttcaaacttcgccgtcagaactaccggccattcaaccagcgaagccacttcttccagcaggctttcactcagatcggcaacgccgccaatcttctgcgcagccagctcggcatcacgtttgataatggatttacgcaattcatagtcagcgataactttgccgcgttccagcaggatctgcggatactgatcggcattatcgatggtgaattcggcttcacccataaagcggtggccgcgaatcacgcgatcagaatcaatgcctaacacggtgccagcaatcagctcattccccagcaacagcgtcacggtatgcacgggacgaacgaattgggtttctttatcaccccagcgcatcaatttaggaatcggcagtttgctcagcgcggtattgaccataccggccagtaacagctgcgccgactggcctttaacgtgggcacgatacagcagccattcacctttatccgtagccagacgctcggcctgatccacggtaataccgcaaccgcgcgcccaaccttcggcagccttggttggcttgccttcggcatcgaacgcctgagaaatggcagggccacgtttttcaacttcacgatcggcctgagccgcgctcagattggctactttaaccgctaaacggcgaggagcggcaaaccagctgacgtcaccgtgagataaattggcgttatccagctcggcggtcaggttggcagcaaaagattccgccagggaacgaagagccttcggcggcaattcttccgtgccgatttccaccaggaaagtctgttgagtcatgacagcctcttagttctgattctttttgcacatagggaagccaagggcttcgcgggaagcgtagtacgcctcggcgacagctttggtcagcgtacggatgcgcagaatatagcgttgacgctcggtcacggagatcgctttacgtgcgtccagcaggttaaaagtgtggcctgctttcaaaatgcgctcgtaggccggcaacggcagcggattttccagcgccagcaatgactgggcttctttctcatactgctcgaagcaggagaacaagaaatccacatcggcgtattcgaagttataggttgattgctcaacttcattctgatgataaatatcgccgtaggtggttttacccaatgggccatcgcaccagaccagatcgtatacgctgtccacgccctggatatacatcgccagacgttccagaccgtaagtgatttcacccgtaactggcttgcactccagcccgcccacttgctggaagtaggtaaactgggtgacttccataccattcagccacacttcccagcccagcccccaggcacccagcgttgggttttcccagttatcttcgacgaagcgaatatcgtgaatggtcggatccagacccaactctttcaaagaacccaaatacagttcctgaatgttgtctggtgaaggcttaatgatcacctggaactggtaataatgttgcaggcggttagggttctcaccgtagcgaccatcggtcggacggcgggaaggctgtacataagcagcagcgattggctctgggccaagcgcccgcaggcaggtcattgggtgggaggtacccgcgccgacttccatgtccaatggttgaacaatggtgcagccttggcgcgcccaatattcctgtaacgtcaggatcaggccctgaaaggtcttggtatcaaacttttgcatgttggattcgcacgcgatacaagtggataaaatggaatgaatcagtatacccgctgaccgtaagatatacagccagaatccggcgagatgtgtaaatcagagggggtttgttgattaaatatccagttaaaggacgtgaaataacgtagtaaagcggaaataaccggcgagaaccttaggtaaaataatagaattccgatgaactaatggaatcaatctatgactcgcctgcggaaatagcacggtcagaaccgtatccactgatataaaccgagcgacaagaagtaccggtaagatacggtctgaaactgttaatcacgacaagctctttcaccgccagccccttattttaataaccaatccagcagtgccatgccaacggtgaccacgcgactgaatcggtattctggtcacggcggcgccctatcggagcagcagggatcggttccctagagccatactcgataaaacaatgatctgatttttggtcatcgcacagagatgggtaggtatcacatgaaaatgcccctccgcctaagggataagcggcaagagtatgagagcaaccgaggagcaaccccagcccaaaggtacacactgacgacatccttagaatatttcgcttagatgacataatatacactcctatataattacacattgcaacaataatggtgtttaatgctgcaattgatcaattattaaccaatggttatctgcgtcaagtttctgcccaaatataaaatgagtaggttgcttatcaggcaccgaacggcgattatcctcctgccgagcatctcatagaggaaacagtaagatggctttagaacgctgtggttgggtcactgccgatccgttatatcttgcctatcacgacaaggaatggggaattcctcagcgaaacagtcaggcgctgtttgagatgatctgtctggaaggacaacaagccggcttatcttggattaccgtcttaaaaaagcgtgaaaattaccgaaaagctttccataatttcgatcctcatttggtagccaaaatggggccgaatcaggtggaagcattagtgcaagacagtggcattattcgccatcgcggaaagattcaggccattattaccaatgctcaggcatatctggctatggaggctaacggcgaagatttctccgaatttatttggagttttgtcgataatacgccgaaagttaatcactggtggagcctggcagaagcccctgcaaccacacccgtttcagatgcaatgtccaaggcgctgaaaaagaaaggctttaaatttattggctcaactatctgttatgcctttatgcaagccacaggcttggtgaacgatcatatgtgcaactgtttctgtcatccggataacgccaataaatgatccgtaaggcgaatgctgaagatcataatgcgttgatcgagttatggttaccaagcaccatcgctgctcaccctttcgtgccagagagctactggcgcgaaagccttgatttggtaagcaatacctatattcctcaggctagcaattggctatatgaaacaccgaatggcaccgttggatttatcagtgtactgaacgaacaattgatcggggcgctgtttgttgagcaaaactacgtcggtcaaggcgttggccatgctcttatgcaacatgtgcaaactcgttatcctgcgttaatccttgaggtttaccaaaaaaatcagcgagcctaccgcttttaccgtaagcatgggtttaacgtttcagagcgatcttataatgaagaaacgggaaattatgttttaaccatgcattgggtaaatcatcaaagataaaaataaatattattggctattttcctactaagactattaaattttaattactgactacaattggcctcgccgcaaataaaaaaataaatgttattggataggttaatattcaaacctccaccttataaaaaggcacaatataataaatcatttttatataggcctacactttccgcgtcgatgaaaaacccaagatgataatggaatattatttatataaacattcatatttcattcagaacagcaacttaatggtgctatgactatggtcgataaaactaagcccccgttatttttgttcttgctttcatccactccatccttagccgaagacgggttctatttcgaatagtatatatcaaaatggatgcgtgtatgaaaccccaaataggcaaaatgaataaaacatgcttttattcaaacgattacttcagttggaaaccatgatgtttactccctaatagcaaactggatcagaaatctcccgccgctgatctgggcataaagtctatactgggaccaggttacgctttacaacgttgtcattcatgggcgttataatcaggtcgaaccgcctggcgcggtataaaaaatttttcccggtaaagatatactttgctcaataaacggggaaattgttagcctgagtatgactgactataactgtgataataacgaaattgcagatagaaacagcattgaactcgccctatcattaacgaacccacttttttattggatctacccgcgaaggtactataagaagaagtgaaacgaacggcgcaagttcattctctaaccacatgaaatataaaacaaagagatggaaaggaaaggaaaggaaaggaaaggaaaggaaaaactattttctctggtagtttcaagccatcagaaaaagtgagaattggattcaaatgtgatgaacgacaatattaataaagcaactctaccagcctaatatctctatcacctgcatctttattttttgataaagacacctttagtgattccctgttaataactactcatcatgtatttaaaatcatatttaacttatcaccctatcaggatgacaagttaaattgtttacctagtaataataaagccattttccacaccataaataacaaaacaattaaaagggattaatatgtataagaatatactgattatcatcctgtcttcatttttattaacaggagcgccaagcatagttttatctcaggacttaccgtacacaaataggataaatgatattgggccaatttatgattatgatgaaccaggaattgaaagtggctatacgttaattcaaccggaagagataatttatctggacatcaatgatattttttcacaacactggcaatcaagaaaagaaacctccgtcagtaatccctatctggattgcgatacagactgcacaatattacagaaaaaaattatcccactaaacgaaatttttactcaagccgctattgatccgaaccattccagccagcaagttttattaagttttgccctaaccgaaaccaatgagttcaattttagcattggacaatatctggatatcatcgttgataaaaatagtgtccgtctgcttggcggagctgtgccaaaaggcattgaaacccctcttaatcatcactccaatcagctcacttttcttttccacgttcaagaccagcaactctctatgagttatatggagagcgacagcacgcaacagcgctacctttcaccaacaataaatctggaaataaaaaaatcaaaagaaataaattattggccggatatcgagatattcaaccccaatcctggcaaccctatactagtaaagaaaatactattaactagccagagcactcatagccgctttaaacgcggcatcgccgggaaaataggctgttatctgtctggcccgctggcactctacaatctggtggtgcaagggcattgcactcaggttgaatctgcatggtcgagcataaagtccttctttgccggaaaggacagcaccaaaatgatagtgattgcagggaatcccattccgctaaaaccgacggttaccccaccctctgagcagactgataacctgaatgcattcgaactcagcgttttgaatacccacctgcatcaccaagcgctaacgttgcctgccgcagccgatttctgccatacatcgatagatgaaatcaaaggtgctcgctatccgcgacaaatcagacacacttgcgccaactggctatccgtcgtgttacaggatttcaccctgctattcggcaatagcctgcgtacctggtccgcagagtatctcacccaaacgctaaatggtattttggatcgccaggcaattgataatgataacgacgcccaagatgcttttattcgccaacctgccgctggcgtgcgactcatccaaaccattgcagatattgctgatagagaaggccgagccgaagttattgagcaagttagcggggcatttactcatgcggtacagaattatgccaactatgtgatgactcaaccttcctccggcccctgtactccttcctgtagcgattcaagttcaagtcatagcagctgtagttgttccgattgcgatatagattcgccattagcggctcaggaattgccgctcggtacttatcagttaactctctccgcctatattcctcaacatacgcaaccgctgattttacaaaatggattatgggtagagccagcgcaaggttttgatatcgaaataatccgaggtacttttgctgagactcgccaacaacgatatgaattgatggaaacaatccagctatggcgaaatgcttatatcgaaaaaagagtgtattgcaataaatacgggaatttccccacgcaaatagatacggcacgcttcgccgggcagtccaccagcactctgctgcgcagtaccttgcggtactttgacgaaaataacctgattgcagtagtccgatttaataaccaaattattaatgtgagcgcggtatctcgtttttctgatcccgatgaagacgcaagcatcatacaagcgaatattattgctacgttgactcacccggcctacgttttaacccccaataatgaaggtaccgttcgccgcgctggcacggctgctctgcatcaacttattcagcaactgattgccgatggcgttcaaacgcttagttcacatgtcatttcaacgccttccgctattgtgaaaaagcgccttggcttcagttttatccctgacaaaccccatagcatcacgccaacacctaatagcgatctttagccaccggctctccgccctgataatttcttattctgggcggacaaccatttcaatatttgatcaacagacttttcgtgcgctctttgacgataaaccggccaaaaaaccacattgcgcggcactatcagagttttctcaatagtattctgcgacgttttaccggataacgatgcccatcattttcagcttccgaacccttagcgggagcttgcttcaggttttagcgacggtggataatttctttacgaaatccacgttgataaacacatttaaggacatcacatgcaaaaacgcacacttgccattgttgctgcactctgcgcaactttgactctttcggcctgtaccactaacccttataccggcgaatctcaagctggaaagtctggctacggtgccggtatcggagccttagtgggcgctggcgtgggggttttatcttcctccaaaaaagatcgcggcaaaggcgcactgattggcgcagcggcaggcgcagcactgggtggtggtgccggttactacatggatgttcaggaagccaaactgcgtgacaaaatgcgtggaaccggcgtaagtgtcactcgtcagggtgacaatatcgtactgaatatgccaaataacgttaccttcgacactgatagcagtaatttgaaaccagcaggtgccaataccctgactggcgtggctatggtattgaaggagtacgaaaaaacggcggtcaatgttatcggttataccgatagtaccggcgctcgcgctcacaatatgaagttgtcccagcaacgtgccgacagcgtaggcagcgcattgatcactcagggcgtagcggctaaccgtattcgtaccattggcgcaggcccggataacccagtggcaaccaatagcactgcggcgggtaaagcacaaaaccgtcgagtcgagatcacacttagcccgctgtaaatgacaaaaagggtgacggctcatcactttctggccgtccccccttcacccccaaatctttctcgccccagaacatccccgataaacaccgccaccgcgcaaagataatctatatcactaccctatggatttcactttgtggcaaggcggcaaccgaaagagtcgccaagagcttagtccaccaagtgactcgggcgagtgagggaagccaacaccgccacggcgtgaaagatgacgggtatttgtgataatctgccgccagttacccttccaggactaaaccgtgagcagtacgaaaggaccgcgcccatctgggcgagcaaccatcaatgatgtcgctaagagtgctaaaactggcaagactagcgtctctcgctatttgaatggcgaacataacctgctgtccgatcgattaaaactgcgtattgaagaagctatcgccaaactaaattatcgacctagtcaggttgcccgcagcctgaaaagggggcgaacccgattgatcggcctgattttggcggatatcaccaacccttattctattgacgttatgcgtggtattgaagccgcttgccgtgctcatggctttaccctgctgatgtgcaataccaacaatcaggtcgaacaagagcagcattatctgcaactgttgggcagttatcaggtggaagggattgtggttaatgccgttggaatgcgggaagaggcgctgtcgatgctgcaacagtcgcgcctgccgatggtgttgatcgataggaagatcgccggtttctcctgcgacatgattggcttgaataatgccgaagcggcaatcatggctaccaatcatttagtcgagcaaaactatcagtctattttatttcttagcgagcctttggggctggtcaatacccgccgagatcgtctgatggcgttcaaagcagcgatggcggtgcatcctgagcgagcgtcggaacacgctgaagtcacgctggaagatagtcagcgaatcaataacattgtcgaccagttcaaccagaaacatggggataaacgccgtgccattttagtggccaacggcagcctaacgctgcaactggcacgcaccttacgccacaataatattcagtggggcatcgatattggcctgctcggatttgatgagttaccttgggcggaactggctggcgtagggattaccacacttaagcagcctacttatcaaataggttacgccgcactcgaacaattagtgaaacgcatgcaggggagtgatgaacctccggctgatatcatgttttctggcgaactggtgatacgcggctcgacacagctttagtccgtcacttttggctcgtcacaattcgataaacacagcggcgggagccagataaaatatgctcagtacgctcaaccggtacttgtaaagcctgctggaaaacctctaactccgcgcgacaaaagccctgacaactggtcgcagcggcgcaaatcgggcaatggttttcaatcagtaagatagagccatcttcctgcatttcccattcggccatatagccttcgcgcgtacgaatagccaccaggcgctccacccgttcaccaatattactggctcctttcatagcctgaaagtattgatcgcgggtttcctgttcgcgggtatcaatcagcaaattaagggcatcttcacctaacttagtgcgaaccatacgcagtaattgcacggttaattcgccgtgagcatcgggaaatcgcgcgtggccagcatcggttaattgccatagttgaatcggccgtccgacgcctttagcctgtgcgaccgcaatcaccagaccttctttggccagcttgacgaactgctgacgcgccgcttccccggtggttccaaggatcttgcccgcatccgttgcctgtagtgggccgcgggttttcagcagcatcagcaagcgctcggagacggattgcgtgcttattaccccatggtcggtggtattcatattactcccgatattaaaaacacattggcatttaccaagcatatacttgacttattaaccctgcacggccacagttattccaagttaacgcttgtttaactcagtctatcatcaaatcttactcaacaaccagtcgtactggttaggataaccactgtgctaatgaatgatgcgagccgctggagcgatctattctccggggaaaatgcggtttttgcctttgcgctgtcggcgggtgtcgcgttacacgccattaatatttatatcgtgacaaccattctaccttcagtggtgctggatattggcgggcttaatctctatgcctggaataccacgctctttgttactacgtcgattcttggctcggcgctctccgctcgcctgttaagtcgctatggcccacgcgcggcctatagcttagccgcttcggcctttatgctcggcagcctgctgtgcgctattgcgccaactatgccgatgatgctggtaggccgcgcagttcaaggacttggcggcggttttctgttcgctctctcctacgccatgatcaatctggtcttcccgcaatctctatggccacgggcgatggcgctaatttccggaatgtggggcgtagctacgttgattggcccggcaataggcggcgtgtttgcggaaatgggggcctggcgtttagcgttttggctattgctgccggctacactgctgtttgcaatattcacctggagaattctaccggcgggaacaaaacgtaccgaaccgtcctcatccctaccgataatccaactgatactgttgacgactattgtactaaccgtttccgccagcagtattgccaccgatttgcgctatagcgctgcaggcattaccgtcgctgccctgctactcacattgatgatccgcatcgagcgccgctccaccattcgtttattaccgcagggcgcactgcgtctaggttcgccgttagcggctttgtacatcactatgtcgttactggcgcttaccataaccagtgagatttttgtgccctacttcttacagactcttcatggccaatcgccgctggtttccggctatctggccgccacaatggccgcaggctggacagtggcggaagtactgagctctggctggaagaaaaacgggataagcttggcaattattagcgggccaattatcgttttactggggttgatcgctctggcgattttgctcccacacagatctgtcggcgattggctaaccctcgcccctatcgctctcgctctgacgttggtcggttttggcaccggctttggctggccgcatttgcttacgcgcattctacaggtcgcagcggatgaagataaagacatagccggtgcctctattactatggtgcagatgtttgctaccgctctgggcgccgcgctggcaggtttggtagctaatatttctggtttaaacgatcccggtggcgttgccggtgcagccaataccgcatattggctattcgctctatttgccatcgcgccgctactggcgattttcaccgcaatccgctgtgcggccattcgtcagccgaccgcgactcttgccacatccgaactgcactaactcatagcccgtagacgctggtcatacccagacagccattactccttgatctctagggggcaatggctgttatgctggctgagcttgaaacttacttattcttagttagccggagtgtgtaatgaagccttctgtcgtgttgtataagcccctccctgccgaactgcgccaacgtttagagcaacattttaccctacactgctttgacggcctgacatcggaaaactcgcaaccattcctttcagcattggcaaacgccgaaggcattattggttctggtggcaaaatcgacccggattttctcgataaagccccacgcctacgcgccgcctccacgatttctgttggctatgacaatttcgacgtcgaggcactcaatcagcggggcatcgtcttgacgcacactccaaccgtgctaaccgaaaccgttgccgataccatcatggcgctggttctggctaccgctcgacgggtagtggaagttgctgaacgggttaaagccggcgaatggcaggataatattgattccagctggtttggcgtcgatgtacaccataaaaccataggtatcttgggcatgggtcgtattggtctggcagttgctcagcgcgctcatttcggttttagtatgcctgtgctctataccagccgtcggtcccatgcagaagccgaatcacgctttaacgcccatcgttgcgatctggatactttactcgctgaatcagatttcttgtgcatcaccctgcctttaacagaacagacgttccatatgattgggccggaacaattggcaaaaatgaagtcaagcgccattctgattaacgcggggcgcggttcggtagtcgatgaacaagcactgatagacgctctgcaaaacggtactattcacgccgcagggctggacgtttttgagcaagaaccgctgtcacaaaactcgccgctgctgaagctcaataacgttgttgccctaccgcatattggctccgctactcacgaaactcgctacgccatggccgcctgcgccgtagataatttgatcgccgcgttaaccggcacggtgactgaaaactgcgttaacccactcgttattgaaaaatagccaagagagatagccgctacccaaataacgtcaatcaaccgaaatggcctataattgcttataggtcagtcggttattttgacgactgatgataagaaagccccctcatccagccttctcctccctgaaaaaacaatatgaggatgaggctatttttccaccggctgacacacttaactcgcctcaaaccctacaaaatcaaacgatcaggaaggcgcgtcatgaaacgtctcacactgcccttattgttagtattttctcccgcagccctagccacctggacgttgcagggcttccctgcattttccgagcaaagcaacggtattttcagcagcgcggcctcgctaactaaaggccaatatccgcttaaattttatcaggataagcaatgctggcagccaactgataccgtcaaactcaatcaaaccttttctctacaggcttgtgataatcagcctgaaatcatgtggcgactatttcgagatggtcagtatcaggcacgtatagatacccgcagcggtacgccaacgctgacgctgagcttaaaacagcccgttgttgatgaatcccaagccgttacccatatttgccagcgctggaacggtcaacccgtaaccgtagacgtcagccagacctttgccgaaggggaaaaactgcgtgatttctattcgggccaaaccgttatcgtcgcaaacggcaaaatcacgctgcaaccggcagagcaaagcggcggcctgttgttgctagaactcgcgcaaactcaagggcctgctccatttagctggcaaaacgccacggtttactttgcattgaccgatcgttttaacaacggcaatcctgccaatgaccatagttatggccgcagaaacgatggcatgcaggagatcggcactttccacggcggcgatttggccggattaactcagaagctggattatttacagcagcttggcgtaaacgcgctgtggattagctcaccgctggagcaaattcacggctgggttggcggcggcaccaagggagatttcccgcactacgcctaccacggctattacgcgctcgattggacccggctcgatgccaatatgggtgatgaacaggacttacgccaactggtggatcaagctcatcagcgcggcatccgcataatatttgatgtagtgatgaatcatgtgggttacgccactctggcagatatgcagagcggccaatttggctcactgtatttatccgcagaacaggcggagaaaacgctgggcaagcactggaccgactggaagccaggcagcggccaaaattggcatagtttcaacgattttattaatttcagtgataaatccagttgggataactggtggggtaaaaactgggttcgcaccgatatcggcgattatgactcacccggttttaccgatctgacgatgtcactggctttcctcccggacatcaaaaccgaatccacacaggccagcggtttgccgctgttttatcgccataaatccgatacggcagccagagaaattcccgcagctacgcctcgggattaccttactcattggttaagcacatgggttcgagattatggcattgatggatttcgagtcgacacggccaaacacgtagaaaaagcggcttggctgcagctcaaacaacaggctacgtcagcattagcagaatggaaaactgctcatcccgatcgggcgctggatgatgctccattttggatgaccggcgaggcttgggggcatggcgtaatgaaaagcgattattatcagaatggttttgatgccatgattaattttgattttcaggatcaggctaaacaggcgctggactgtttctcaaccattgacagcacatatagccaaatggctgaaaaattgcagaattttaacgtactgagctacctttcctctcacgatactcgccttttctttcgcgatgatgcggctcaatcattagcaaaacagcggcgcgccggagatttgctgctgctggctccgggagcgattcagatcttctatggtgatgaaagtggccgagaatttggcccaaccggctccgacccgctgcaaggcactcgctcggatatgaactggaatgaactgaacggctcgaaaggagcgctgctggctcactggcaaaaaatcagccagttccgcgcgcgtcatcccgcgattggttccgggatacaacagtcacaacaaactgctgattattatgcgtttagccgtcagcatttagacgataaagtccttattgtctggacgggggataaaaaacagtaaaccagactattatcctgacatatcgagttttattgatatatctgcgcacaaggtagaattatgggtacgttgcacccgcaattatctggctgtatggtgctcctttacctccgataacaattagtcagcatttatgaagttttcactttttggcgataagtttacccgctacgcgggcattacacggttgatggatgacctgaatgaaggattacgcacgccgggcgctatcatgcttggcggtggcaatccggctcaaattcctgagatggatgcctacttccggcggctatgtcaggagatgctggataaaggacagctcacagaggcgctatgtaactacgatggcccgcagggtaagaatctgctgctaaacgcgctggcaaaaatgctgagtgatgagttaggttggcaggtcgaaccacagaatattgcactaacaaacggtagccaaagcgcgtttttctacttattcaatttattcgctggccgccacgccgacggatcgctgcgtcgggtattattcccgctggcacctgaatatttaggctacgccgatgccggtttggatgaagggctgtttgtttcgactaaaccgaatattgagctactgccggaaggccagttcaaatatcacgtcgacttcgatcacctaaagattaccgatgatatcgggctgatttgtgtctctcgaccgactaatccgaccggaaacgtcattacagatgaagaattaattcgtttggatgctctggcacagcagcatgatgtgccgctactgatcgataacgcctacggcgtgcctttccccggtattatttttagcgacgcaacccccctgtggaacccgaatattattctgtgcatgagtctgtcaaagcttggcctgccgggttctcgctgtggcatcgttgtcgccgatgaaaaagtgatttccgccattacgaatatgaatggcattatcagcctgtctccgggcagcatggggccagcgatagcggcagaaatgattcaacgcggcgatctgctagacttatccaacaatgtaattcgtccgttctattctcaacgcgtgcagcatactcttgaaattattcggcgttatcttcccgccgaacgctgtctgattcataagccggaaggcgcgattttcctatggttatggtttaaagacctgccgattaccacggaaatactctatcaacgcctgaagaaacgcggcgtattgatggtacccggccactacttcttccccggtttggaacatgattggcctcatactcatcagtgtatgcggatgaactacgtgccagacccagaacagatcgaaaaaggtgtcgcgattctggcagaagaagtggaattggcttatcaggaagcgcgctaacaacgatgaagcgcggagagaaataaggcgatgttcgctatcggtatagtgagcagcaatcaatatagtaaacactggcatagcaaaactgcgctaggtggctgaataacttaacttctctctcaaaccccaaagaacaacctcggttgtcctttggggtatttagcgacctaaaagcgctacaacgtccagaacagtacggccagtatctgcggagacataatccttaggaacattgctagcggatacacggtggcataagacagcgccgcagcaccactggttgggtgtaagccattggcgaaagccagcgccggaggatcggtcatagaacccgccaacatgccgcatagcgtcaggtaattcattttagtgagaattcgcgccagaatcccgacggttagcaggggaatcgcggtaatcatcgcgccatagccaatccacgccagcccatcgccataaagcagcgtattaataaaatcaccgcctgatttcagcccaaccaccgacaggaaaaggactatacctagctcacgcagcgccagattagcgctaggcggcataaaccagtacagtttaccgatgctaccgatacgccctaaaatcaatgcgataaccagtgggccacctgccaatcccaagcgtaaagccgcaggaaaaccgggaacaaacagcggtattgaccccagtaacacccctaatcctacgccgataaataccggcaacatttgtacttgttgcagtttttgttgagcgttacctataaccgcagcgaccgcctcaatggattccggtcgccctaccagatttaaaatatcaccgaattgcaggctggcgttgttgctggcgactagctcgataccggctcggtttaaccgagtaatagcgacgtcgtatttctgtttcaggtttaaatcgcgaatttttttgcctaaaacagcctcgttggtcaccaccatccgtgccgattgcagcgcgctgccggcggtggaaagcgccacatccacctcttcaccaagcactaaacgcactttttccagatattcgcgctgtccaactaaatgcaggtaatcgcctaactcaattaaggtagcaggcagcggtaccatcaataaatcaccgcgtttcaggcgagagcacaccacatcatcgctatttaacagcggaatatcctgcatcgccaagccatccaaattaggattgcgtaccgcgacgttcatggtttgcagcagttcacggttttgtccgctcctgctatcaaaatctttagcttcacgatcgacatttatcttaaatcctagccggatcagccacataaccaacagaatcccgcagataccaaaaggataggccatggcatatcccatccccatttgcccaaccaactgaggagaagatcctaaatccgtcaatacctgctgagccgcgcccagcgccggagtgttggtaactgcaccggaaaaaataccgagaatgatcggtagaggcacgttgaaaagtttgtggataaccgccgttaccagacaacccatcactaccattaatatggcgaaagcattcaggcgcagtccggaaactcgtagagaagagaaaaaccccggcccaacctgaataccaatggtataaacgaacagaatcaggccaaactcctgaataaagtgaagcatgtcaccgttgagactgacctgataagtttgggcgaaatgaccaacaataattccgccaaataatactccaccaatccctaacccaacgccatatatcttccaattaccgatccataaccccaatacggcgaccagcgccaacatactgacggtaagggcgatatcagtcataaatcacttccttgcctaagtttaaaatccggtcaaccgacctcggtcttaaattcttacaattagtagggattctggcagaagggcaacgaagggactgtgggatgcaccacaaaatgcgccggataacaggaatgtttccggcgccaaaagctagggaggagggttttactttttttattatctgcaccggctcccggaagggagaccggtgcgagttgggtcactgcaaattactgctgaacggtttctgcgttatccaatgccgggcgatcttctaccggacgaccgatagtaatacgctgtggctggagtgcttcaggaacctgacgcagcaagtcgatatgcagcaggccgttttcaaactgcgcgttatcgacgttcaggtgctctgccagagtgaaggtcagattaaactctttacgaatcagaccctgatgcagatattccacctgtttctccacgggtgctggcttaccacgaaccgtcaagcgagggccttcaacttcgatctccagttcactttgcttgaacccagccagcgccagagagatacggtagtggttatcatcacttttttcgatgttatatggagggaacccctgtgcctcggtagaaccctgcatagtgctcgccaatttatcaaaaccaatccactgacgaagcagaggtgacaaatcataattacgcatagtgttaactccttctttgaagcgaggtaataggctgccacggccgcgttaataactttttttttcaaatcaaagtctgctgttaaataacaaacaggcgttattaacccgtgacaagttggcccccgattacggcagaccaaactcttgattaataatgtgcctaatgcacattatttaaattttatttaatctcaatccgacgaggtttcatactttcaggaacaattcgttccagatcgatatacagcaggccattctctaaattggcgcctttaattttaatgtgttcagccaattggaatttgcgttcaaagtttcgttccgcgatcccttgatataaataagtgcgctgtgctggagcttctacgtgagaaccacggacaatcaacaggttgtcctgagtgactatctccagttcctgctcggcaaaaccggcaacggcgatagcaatacggtagttattttcatctaccagctcgacattatacggaggatagccgccgttattctggctctgaccagtttctaataagttaaacagacgatcaaaaccaatagcagagcggtataatggagcaagatctgaattacgcataacaactgcctcctaaattcattagcaaggttaaataggtcttccttaatggacagactcttggccagaataccctgacggcatattctctctcggcctgataataagatgggatcgaattttttcatttcaactgtcaaaatgaaaaaattttttttaactaaagatttttgctctaaaaacagagttatcgcatacactgaattgggagcgccgccacatctgcgtgtaattattatattaaagcgacagcaaaatgttataactctgagagatcgcttttatgttggctgacaacctgaacactgccaaatgagatgtaacgatatgataagagctaccgttcttcctatggtcactggctgtaccctgctgtttaccagcggctgttccagcattatgactcacaccagtagcagtcagggctactattccggcacccaggctaacgtcgccatgctcaaggatgacaacaccggctgggcgttgcgcccgctgctagccgttgatttacccttttctgccgtaatggacacgctatttctgccttacgattatctgcgttcagataacgaccctgcgcccggctcgccccgagaacgtatccgtcaggaagaagcgcaaaatatggccgccagcgctcaccccattcagtgaatttattatttatcgattaatataggacttaccggttaatgatcaattagccggcttcaaccacaaaaatctgcgaccaaccgtcgacctcccgcatataggcaactttcgtcccatcaggggaaaagaccaccgcgtctcccaatggggggaccgcggttcgctgagttagccgctgaacctggccgctgccaatttcgcaacacaccacactgttatctctgacaaaagcaattctgtcgcccttaggactccaactgaaagccgattgcacgccgtgcccgccatgagtcaattgccgtgattcgccgcccagcggagaaaccagataaagctgtacgattcccgcatcatccctcatcaaacaggcaatggcgctaccgtccggggaggagcgtaaccagtggcgtggcgtgatcgccagccctggatatctgcgtttttccgtataagtcaaccgccgttgatttacccccaacggaggcgctggaagacggtattcatctccctccaaggggctcgaacctgctcgggcgaattctcggtttttttccggtaaatcaacaataaagacttcaggcagtttagaaccatccgccgcgaccgtatcgccaataaacgccagcgcccagcgttgtcggctgccgtcggctttcaagtagccctgtttgccaatccagccttcttcataagcgcggttgatttcatcactccctggccggggcattgacgtggtacggctgaccagaacgcagaaatggctgccatcatattcacgaggatgatgctttggcggattaaccccatgcaacggcacggcaacgccgacgttacgtaaatccagcgcgggatcgcgttcatgcagcacatggtcgttataggtaaaactcagacgcgagccgtcggggctaaaaacgtggacatgagtcccgccacgcaaagcgccgggagtataaggcgcagtgatatccatagcgtccaacgtaatggccaactcccgatccggctcgctgacaatcacaccgcgccgatgatgaaaatcataatgccattggctatccggatgttccgggccgtggataaatacgtagcgagagggattatcagggctggcggtcactacaccaacgtgagcgccgtgctgagcacgataaataacctcaatcactcccgtattacaattgactctttcaatagttaaaccggtgaaagaagccccgtttggccggacgtcatataccagccactggctgtccgccgtccagacattgatattggtgagctgatgacctcgaggatcgaaagttaactgtttttcctgatggctcatatcgcttctcgctgataacccgtatagcgctcatcctgccccattcgccgcactccgtcatccgcgatataccatccgcgcgacccaacgggcgatttattcaccttcgtcgcttccaatttagaatttaatgtctaatatagaatttaaagtacaaatagattgagtataaatagagatacctatgctgagccgctatcacaccattgccgatgctatcgcgatcctttttgccccctatgccgaagtcgctattcacgatatggccagtcagacgctggtttatatcgccaataactattcacatcgtcaattgggagaggattccaatttaagcgagctggcgttcgaccaaagtgcaaagctgctgggaccttatcaaaaacgcaattgggatggtcgtcagcttcgttcaattagctcggtgctgcgggacgatgacgggaaaattatcgggttactgtgtatcaatctggatattaccgtgtttgaaaacgccaaaatggcgttggatatattcctcaataacagcgggttacagcctcaacctgcagttttatttcaggatgactggcaggaacgtatcaatacttttattcaccagtggttgcagcaacagcagctttctctctcaacgctgaataatcctagccgccgcgccttagttgaagcgctttatcagcacggcggatttaaaggcaaaaatgccgcgggctatgtagcgaaaatcctcggaattggcagagcaacggtttacaactacctaaaaaataataaggaatccctatgagttcgctatttgatgccattcaggaagcccatcagattctgcgtccgcaggtacgcattacgccactggattacagtccgttgctctcgcagcacactggttgtgaggtttatctcaaatgcgatcatcttcagcacaccggttcctttaaatttcgtggtgccagtaacaaactgcgcctactgagcgaagaacaacgccagcgcggcgtgatcgccgcctctaccggcaatcacggtcagggcgtggcgctagccgcaaaactgctgggcgtcgaagccactatttatgccccagaacaggctgcagccatcaaattagacgccattcgcgcgctgggcggaaaaatcgagctggtagccggtgatgccttaaatgcagaactggccggagccaaggcggctcaggaacaggggaaagcctatatttccccctacaacgacgagcaagttatcgccggacaaggcacctgcggcatggaaatcgtcgaacagcagccgaatctggacgcggtttttgtttccgttggcggtggcggctatatcgccggaatcgcaaccgtattgaagaagttgtcgccaaatacgcggattatcgcctgttggccagcgaatgccaccagcatgtatagcaatctgctagccggcgaaatctatgaagtggaagagcaggaaacgttgtctgacggcaccgctggcggcgtagaaactggcgcgataactttcccgctatgtcaaaaactgatcgacgataaagtactggttaccgaagaagagatcagacaagccatgcagttaattgcccgcagcgaccgctggatgattgaaggggcggcgggcgtggcgctggcggcagcattgcaacaggcaccacaatggcaaggcaaaaaagtggcggttgtactgtgtggtaaaaatatcgtactggaaaagtaccttaaggccgtttcctgatgcttatcctcaataaacagcaaatactcgacagtttcgccgccgatcgtaccactttactgctaaaacaaggatttatcgcgttcagccagcagcaggttcagatgccggcggtacagcatttgttattcacacaggctaatggcgattgctgtatcaaaagtggctatctggaaggagacgacagttttgtcgtgaaagtttccagcggattttacaccaatccatcattaggattatccagcaatcaaggtttgatgatggccttctcggccaaaaccggtgagccacaggcgctattaatggatgaaggctggctaaccgctctgcgcaccgcattagccggtcgaattgttgccgaactttgtgccccaaaacacattacagctattggcattgtgggcaccggcttacaggctcgcttacagttggtgcacctgaaggccgtaattaattgtcgggatgtctgggtttggggacgaaatcctgaagcattatacgattatcagttatttgctgaatcagaaggttttcgcgtacagatcacgcaaaatgccagccagttagcggaaaagtgtcaatttatcgtgacgactacgccgagccgcgaacctattttgcgggctaaagacattcaacccggtactcacatcaccgcagtcggcgctgatgctactggcaaacaagagttggaaatccaacttgtggccaaagcagataagattctggtggattcattggcgcaatgccgcgcattcggtgagatttcccatgcttttcagcagcagttacttcaggcaacacccattagcgagatcggtgaagtattggcgctaaataaacccgttagagaaaatgatcgtcaaatcacgctggcagatttaactggcttgggcattcaggatgtacagatcgtaaaaagcattctgctttcctgcccctgagcctcagaacaggaaggggccactaatggcccctaaagcgttttttacgttatttagcagcaaattaacgttgattcagcacaaacttttcaatggctagcgctacgccatcttcttcattagttgccgtcacgtactgggcaatctcttttagctcgggaatagcattccccatcgccacgcccaggccagcatattcaatcatcgcgtaatcattactctgatcgcctaaagtcatcacattttcctgtgcgatgcctagatgctccgccagcattttaacaccggcacctttatcaacgcgtttacttagaatttccaggaagtaaggcgagcttttcataatagtgaacttctcgaacacttcggcaggaatctgtgcgatggcgcgatccaaaagctctggttcatcgatcatcatcactttagggaaacgcattgttgggtccatttcactgacactacggtatttcaacgaaattcccgtcagaacagtttcgtgaatggtgtacttactgatgtctttgttagcggtatacaacgtattgtaatcaaaagcgtggaaatgcacgcctaactgccgcgccagagcttcgaaataaagataatcatcaaagcttaaggtttcctgcaacacacattcaccggtcgcggctttttgaactaatgcaccgttattgctaatgcaataatcgttgctgttttccatattcagttcgcgcagatattgagtgacaccgatataaggccggccggtagccagtaccaccaccacgccttttttctgtgcggcctcgatggcctgctttactctaggggtaatttggtgaagcccgttaagcagcgtaccgtccatatcaatcgcaatcaattcaatagccatgacaccctcatatatttacatcgtcttgcatcatgctaacgcgattcagcgaacgaatgctagcaagggtttactcaaccgcctgcttgcctatgaaacctggctcgaagcagcaatattggctgcaaatcgcgcctaaactggcttttcaggcaaaaaaaaaccagagacagtcgcctgctccggttttcttattgccgcaatttatcagatatcgatatttgctgcttttaaggcgttttcttcgataaaggcacggcgtggttccactgcatcacccatcagagtggtaaacagttggtctgcggcaatggcatctttcaccattacgcgtagcatacggcgactttctgggtccatagtggtttcccaaagttgatccgggttcatttcccccagacctttataacgctgaattgccagaccacggcgggattctttcaccagccaatccaatgcttcttcgaagctatcgaccgcgaaacgacgctcgccgcgctcaacgtacgcaccttcttcgatcaggccacgcagtttctcacccagcgtacaaatcttgcgatattcaccgccgtgaatgaattcgaagtccagatcgtaatcggtatcaaccccgtgggtacgaatgcgcagaatcggctcaaacatctgacgctcacggttttcacgaacgatcgagctgtagctgctaccgtgctgttcattttcattcagcaagttcaccagagaatcgatccactgctgtaccgcttctttattgtctaaatcgtcttccaacagcgttggctgataaatcaggttattcagcagcgcacgcggataacggcgctccatgcgagtaatggttttctgcacgctgtagtgttcagcaaccagtttctccaatggttcgccagacattgctggtgcattagcgttgatatgcagagccgcgccatccaatgccagagacatttgatattgctccatcgcatcatcatctttgatgtactgctcctgcttgcctttcttcactttatacagcggcggctgagcaataaacacatggccacgctcaataatttccggcatctgacgatagaagaaggtcaatagcaacgtacggatgtgagaaccatcgacgtcggcatcggtcatgataatgatgctgtgatagcgcagtttgtccgggttatattcatcccggccaatcccgcagcccagcgcagtaatcaaggtagcgacttcctgcgaagacagcatcttatcgaaacgcgctttctcaacgttaagaatcttacctttcagcggcagaatcgcctgattcttacggttacggccttgtttagccgaaccgcccgctgagtccccttccactaagtagagttcggacagcgccggatcgcgttcctgacagtctgccaatttgcccggcagaccggccaaatccaacgcgcctttacggcgagtcatttcacgagctttacgcgctgcttcgcgagcacgagcggcatcaatgattttaccgaccacgattttggcgtcggttgggttttccaacagatattcgaccagcttctcattcatcagcgtttcaaccgcggttttcacttcggaagaaaccagcttgtctttggtctgagaggagaacttaggatcgggaacttttaccgaaactacggcgatcaggccttcacgagcatcgtcgccggtagcgctgattttcgcttttttgctgtagccttctttatccatatagctgttcagggtacgggtcatcgccgtacggaaaccaaccaaatgggtaccgccatcccgctgaggaatgttgttggtaaagcagtagatgttttcctggaaaccatcgttccactgcaacgccacttccacgccaatatcgtcttttaccgtagagaaataaaagacttttgggtgaatcgggtttttgttcttgttcaggtactcgacaaacgccttgatcccaccttcgtaatggaagtggtcttctttatcgttacgcttatctttcaacttaatggaaacgcctgagttcaggaatgacagctcgcgcaggcgtttcgccagaatttcatactggaattcagtattattggtaaaggtctggaaactcggccagaaacgtaccatggtgccggtttgttcggtttcaccgacaactttcagcggcccctgtggctcacccattttataagtttgctcgtgaactttaccttcacgacgaatgaccaattccaatttttcagaaagggcgttgacaaccgaaaccccaacgccgtgcagaccaccagacactttataggagttatcatcaaacttaccgccggcgtgaagcacggtcatgatgacctctgccgcggaaaccccttcttcttcatgcagaccggtaggaataccacggccgtcatcctgtacggatacggagttatcggcgtgaatagtcacctgaatttctttacagtgacccgcgagggcttcgtcgatagcgttgtccacaacctcgaataccatgtggtgcagaccggtaccgtcatcagtatcaccgatatacatgcccggacgcttacgaaccgcatccagcccttttaataccttgatacttgaggagtcataagtattcgacatcaacgtttctcgctcatctttaatcctgtggttgaacctctattttgccatgttccactcggaacatcttgcccttttcacctaccatgtcggttacttgttcagcgctaaccgcactgacaaaaacctgtgcctgggtggctttcaaacgctcagccaataaacggcgtcggccggtgtccagttcagaagcaaaatcgtcaagcagatacaggcaacgccgcccgctctgtcgggtgagaaactcaccctgcgctaaccgcagcgcgcacatcagcagttttagctgaccgcgcgatagcaaatcttctaccggcgtaccctcggcccgaatgcggaaatccgctttatgcgggccgacggcggtataggttagcgctctgtcacgctcaaactggcgttccagcaactcaccgtagtcgctctctttgtcccagccacgctggaaagagaaactcagggcgaactctggcaggaacagggcgcatgtcgcagcaatatctgcggcaatggcgtcactgtatgccgctcgccattcgctaatacgctcagccagcgggataatttcctgatcccaaggccgtatttgcgcatagcgattcacctggcgcagcgcggcgttgcgctgcttaagtaaccttttcaggttgctccaggcagtaaagaaaccgggttcattatgaaagcaaccccagtctaaaaaagcgcgccgaaacttcggcccgccgttcaataaggtaaaaccttctggcgtgatcagctgcattggcaacatttgcgccagctcagccactttatggccgtcactgccatcaatccgcactttactttcgccctggcgactcttgcttaacccaacggacaactcacgctcaccgccgtctacccgcccatgtaatacaaactcaggacagtcatggcgaatcactcttcctgcctgtaggctacgaaaagccctaccatgaccaagggtatatactgcttcgagtacgctggttttgccgctgccattggggccgacgagaaaattaaatcccgcggccggtgccagatctgcagattcgatattacgaaaatcttttatcagtaaacgcgtcaaagccatgaagctggttcttattcttatgatcgaggacgtcattatcgccggcagactggatgtgagcagagttcagcctcatccatgcaggcaaatagacagcccgataaatactacaaacgcattggcatgactacgtaagccgccgcctgactcgcgctatcttcaatctgtacgcttgaagtcgaatccgttagcaataggcgaacatcttcacatttcaaagcgttaagcacatccagtacgtagctgacgttgaaaccgatttccatttcctcgccttcatagctaacgtccagaatctcttcggcttcttcctgctcagggttgtttgccgtgatcttgagctgattatggctaacatagaggcgaacaccgcggaatttctcattcgataaaatagcggcgcgggcgaaggcctgcttcagcaaatcacagcctgcttccagcgttttatccggattcttcggcaatacacggcgataatcagggaaacggccgtcaaccagcttggaagtgaaaataaaatcacccacgtgagcacgaatgttgttactgccaatttgcagacgcagtggcgtgtcgccgccgtccagcaatcgaaccagttccatgacccctttacgcggcacgatcaccgaatgtgaaggcaaagtctggccaataggcattgagcacaccgccaagcgatggccgtcggtggctacggtgcgcagttcttcaccttcggtttcaaacagcataccgttcaagtagtaacgcacatcctgatgggccattgaaaactgggttgactcaatcagacgcttcatcgtggcctgaggcagcataaattctacctcactttgccagtcatccagattcggaaaatcagcggcaggcagcgtagacaacgagaagcggctgcgaccagaacgcaccagcaggcgatcgccatccagcgccacggtaatttcagccccttccggcaacccacgccagatatcaaaaaacttccgcgcaggcacggtcgttgcgccctgttcatgggagtgggacaaggcgactcgcgccaccatttccatttccagatcggtaccggtcagcagcaaagagccttccgtgacttgcagcaacagattgcccagaattggcaacgtcggacgtccacccagcgggctactgacctgttgcaggggttttagcagatgctcacgttcaatgataaatttcatagcgctaggaggataatgttctgattaagttagagaaatcttctttgatgtcgtgactttcttcacgcaactgctcaattttccggcaggcgtgcaacaccgtggtgtggtcgcggccaccaaacgcatcgccgatttcaggcaggctgtggttggttagctctttggccaatgccatcgccatttggcgtgggcgagccaccgaacgagaacgccgtttggagagcaggtctgcgaccttgattttataatactcggccactgtcttctgaatattatcgatagtgaccagtttttcctgtaacgccagcaaatcacgcagcgcttcacgcacaaaatcaatggtaatggcgcgtccggtaaagttcgcgttggcaatgacgcggttcagcgccccttccagctcacgaacgttagaacgcaggcgtttggcaataaagaacgccacttctcctggcagacgaatatcattttcatccgcttttttcatcaggatcgcaacgcgggtttccagctccggcggctcaatggcgaccgtcaaaccccaaccaaagcgtgatttcagacgatcttccacgccatttatctctttcgggtagcgatccgaagtcaaaatgatttgttgattaccttcaagcaaggcgttgaaagtatggaagaactcttcttgtgaacgctctttattggcaaagaactggatatcatcgatcagtaacgcatctactgaacgataataacgcttaaattcttcaattgcgttgttttgcaacgcttttaccatgtcctgcacaaagcgttcggaatgcatgtaaaccactttggcattggctttacgcgccatgatgccattccccaccgcgtgtaacaggtgagttttacccaagccggtgccgccgtagaggaatagagggttataggcaccacccggattatccgcaacctgacgggctgccgcgcgggccagctggttagatttaccttcaacaaagttatcgaaagtgtgcttagggttgacgttagagcgataagaaagctctggctgcgccggtgagctgtcccaactcggacgcatcggcgcactgcgaatcaccggagcggcgggcgcactgacgctggcggcggtaaccggttgattctgtgtttgcaccatgggtttgctgccaacttcaaagcgaagcaagggtacgtttgtaccgcagaagtcattaagcaaaccattgatattgtttaagtacttatcacgtacccagtccaaaacaaaacgattaggtgcgtaaagcgccagagtattgtcactcagttccgcctgtagggggcgtatccacatactaaattctgtggcaggtaactcatcctgcaatcgggcaagacactgctgccaaagcgaaagtgacacggcggactccactcgaacaagatcaataaaagaaagaaatcaggatattgtgtaaatcatcgtttttgacacacgccaattggcctgtagcaggccgaagcgacatgcgaaccgtttttacggttgtttttttacgattaacatccccccacgatcccagagtagagatcgcgatcggaatggcggatcatagcgcaaaaggagcaatagatcctccccttcctcacagattagatcctttttatccacaggtgtggcttgacaaacaagtgtaacccaccgcgccgcatttggttgagcacatcagcattaatcaagaaaaatttcagactttcctgaaataacccacagcctgcccacaatccgatcccctgatgagaacaaaggatcttgatgcgatccttgcgatttatcagggagtccgtataatcctcagccctacgtgtgatgcctgttttccagatggctttggccaaacggaatccttcggtaaacacgggcaggctccttggtaaactcccggtttggaaaacttccttactggcttgcgcaatgtgaattgactcaggactgtacaattattacaatcccgcttctttatatgttgcgattgaggcgtcggtggtcttcactccgagcagccaaacgcgtttactgaatcagtaataattttaagtttaggtagaaatcgctatgaaacgcactttccaaccgtccgtattgaagcgcaaccgtagccacggtttccgtgctcgtatggccaccaaaaatggtcgtcaagttctggctcgccgtcgtgcgaaaagccgttctcgtctgactgtttctaagtaataaagctaaccgactgagtggttaagctcgctttccctagggagttacgtttgttaactcccagtcatttcactttcgtcttccagcagccacaacgggctggcacgccgcaaatcaccatcctcggccgcctgaacgagctggggcatccccgcatcggtcttaccgtcgccaaaaaacatgtcaaacgtgctcacgaacgtaaccggataaaacgcttaacacgcgaaagcttccggctgcatcagcacacgttaccgtctatggattttgtggtgttggttaaaaaaggtgtggctgaccttgataaccgtgcgttgacggaagctttggaaaaattatggcgccgccactgtcgccaggctcccgcatcctgatcggcctgattaggggctatcagctcgtaatcagtccgctgttggggccacgctgtcgtttccatccgacgtgctctcattacggaattgaggcattgcgccggtttggcatgataaaaggcagttggttaacgctgaaacgcgtattaaaatgccaccctttgaacccaggtggcgatgatcccgtgccgccgaaacccgacgataacagagaacactaacgatggattcgcaacgcaatcttctcctcatcgcgctgctgttcgtgtctttcatgatctggcaagcatggcaagtggataacaacccacaaaccgccgcccagaccacgcaacagacttcgaacgcagctaacggtgataccgcaagccaggccgtgccagccagtggccaaggccaattgatcacggttaaaactgatgtgctgtctctgaccattaatacacgtggtggtgacattgagcaggctaacctgctggcttacccggattctctgggttcagacaaaacatttgagctgttggaaaccacgccagcctttgtttatcaggcgcaaagtggcctgacaggcaagaatggcccggacaacccggcaaacggcgaacgtccgctgtttgaagtggcgcaaaacagctttgtgctggctgacggtcaggatgaactgcgtatccctctgacctttaccggcaaagatggctcggtctttacgaaaacgttcatcgttaaacgtaacgattacgcaattggcgtggattaccacgttaaaaacgcctctgccgcaccgctggaattgacgttatttgggcaattgaagcaaagcatcaacctgcctaaacaccgtgataccggtagcaataacttcgcactgcacacttatcgcggcgcggcgtactcctctgatcaagataattatcagaagtatgctttcgataaaatcgaaaaagaaccgctgaatatcaccaccaaaggtggctgggttgcgatgttgcagcagtattttgcaaccgcgtggattccagcggctaacgaaactaacaccttctattctgccgatctgggcaatggactggcggctatcggtttcaaaggtgcgcctgttgtcgtacaaccgggtgaacagaaacagctgggagcaaccctgtgggttggcccggaaattcaggacaaaatggccgctatcgcgccgcatcttgacctgactgttgactacggctggctatggtttatctctcagccactgttcaaactgctgaagttcattcacggtttcgtcggtaactggggcttctccatcattgtcatcacctttatcgtgcgtggtatcatgtacccgctgacgaaggcgcagtacacttcgatggcgaagatgcgtatgttgcagcctaaactggccgcgatgcgtgagcgaatcggcgacgataagcaacgtatgagccaggaaatgatggcgctgtacaaagctgagaaagtgaatcctctgggcggctgcttaccgttgatcatccagatgccaatcttcctggccttgtactacatgctgatgagttccgttgagctgcgccatgcgccgtttatcctgtggatccatgatttatcggcgcaagacccgtactacatcctgccgattctgatgggtataaccatgtacttcatccagaagatgtcaccgactaccgtgactgacccgatgcagcagaagatcatgacctttatgccggtaattttcacagtgttcttcctgtggttcccagcaggtctggtactgtactatatcgtcagtaacttggtgaccatccttcagcagcagttgatttaccgtggcctggaaaaacgtggcttacacagccgcgacaaaaagaaataatgtgtatcggtaatcatctgtagtaatagcctaaggcggtcaattgaccgccttattcttttttagtagaaaccacttttacgccgtccaagagagagataaccatgagcgcaacggatacgatcgtcgcacaagctaccccaccgggacgcggtggcgttggcattttacgtgtttcaggccgtgccgtggcggccgtcgccgaggcagttttgggtaaattacccaagccgcgttatgccgactatttgcctttccgcgatgccgacggcaccacgctggatcagggtatagctctctacttccccggcccgaattctttcaccggcgaggacgtgcttgaattacaagggcatggtggccctgtaatactggatttattgcttaaacgcgtcttggccctgccaggcgtgcgtattgctcgcccgggggaattttccgaacgtgcgtttctcaatgacaaactggatttggcacaggcggaggctatcgccgatctgatcgacgccagttctgagcaggccgcgcgttcggcggtcaactcgctacaaggcgctttttcagtccgaattcatcaactggtggaagcactcactcacttgcgaatctatgtggaagctgcgattgattttcctgatgaggaaatcgactttctttctgatggcaaaatagaaggccagttgaacggcgtaatgcgtgatctggaaaacgtacgcgccgaggctcgtcaaggcagcctgctgcgagaagggatgaaagtggtcatcgctggtcgcccaaatgcaggaaaatccagtcttctcaatgcattagcaggacatgaagccgccattgttacagacatcgccggtaccacccgcgacgtgctgcgggaacatattcatatcgacggtatgccgctacatattattgataccgctggcttacgggaagcaagcgacgaagtagagcgaattggtatcgaacgtgcttggaacgagatcgaacaggctgacagagtgctgtttatggtcgatggcacaaccactgatgctactgaacctgcgacaatctggccagagtttatggctcgtttgcccgcaacattaccgattaccgtcgtacgtaataaagccgatgtgacaggcgagacgcttggtttaaccgaagtgaatggttactcacttattcgtttatcagcccgaaccggcgacggaattgacctgctgagagatcacttaaaacaaagcatggggttcaccagcaataccgaagggggcttcctggctcggcgccgccatttacaggcgctggaagccgctgcacagcatctggttcaaggtcatgagcaactggttggcgcacaggctggcgagcttctggctgaggagttacgccttgctcaacaatcacttagcgaaataaccggtgaattcagctctgatgatttgctgggccgaattttctcaagtttctgtatcggtaaataatcaaaaccgaatcgggctaagccaaatacagtgcttatcccgataatttatgatggcattttattcagaggccatcataaagatcaaagaacattgcaataagtggtgagtgagcactcaccacttacagagttctagctaataaaggcgctcaatcggcaaaagcatacttttacctcatctactccctatcgcgctgctgctattgcgcccttaaattaaggttatttataattgacggtgaaagtagccgtagtcatcagactgccagcagcaattctattctcggtttgatagaatctggccttatagggcagttgggttaaagtagagagactcccaagcggttgttctgtatcaaaaaccaaaggagcatcccgctcaactatttgaatgcccacccccgctgaagtagatgtcgaatccgctttgatgacgccgttgctacttccaccctgccagataatagtcgcttgaacccctccactacactgcacttcaatatcaaaacttcgctcaccgctagtgctgccgacacctttaaaggtatttttcaatacagcgcccattggaacatcaatttggggcgtcctgacttcacaggtttttgccgttactttaaaactgggaatttcgtagctaaataaaatctcatcggtattgaatcccttctcatcctgacgagctaatattatttttattggattaaccacaccagagtcggcattcttatcaactgatatataaaatttaccggtgaagttttttctgacaccgatccctctcatactaccaacattcatttcctgagggcttaaattatttggttggaggctccactttattttcactcctaacagattggtatcaaaataattatttatgccaatactagacacacccagcatagacttaacataaattccctgatgggttttccccggacaatttacgttaattccacttacagttttaactattattttcggtgaatgagccatatctcgacgaatagaaatatcatcaaaattaactacccctacagctctgttagcgttacatacaggggattttgcagctttcgctccatttaaataactacaaaaaataatagatataactaacatcaatcctgttttattatattttcggctaagaaaaatataattaatagaagcaaacataaaaaatccttttaataacgacactgggccacaagccgtaaaacacctgatttatctgacatctttgataaatctaactttgcataacagtgctgagcaggctcttttccccattgcacctttatttccgcattttctggaacggcgtttaagtacaactcaccttcatcaccaacaattccactgctatcaccgtttaccaacgtggcactggaaccaaaaggtacaggcttattatcactaagtaatgtcaccagtattcggtgcccctgccggacgcgaaaatcagcggcaaccaccgcgccacgggttggtacaacttgctgcactgactcatccaaatcgaggccgtcagccagtccttctgtatctaaagccacgcggttataggcataaggttcaatagacggaataactgcataacctctcgaatcagttttaatgcctctctgatttaatatttttgcttccgcagcgccttctgctctaaccaatgccaccgtctcccctaaagattgagagaaagtaataccatcacggtgagcaacaataccgcccgataatccgtaatttagcattctgctattatcgctatggctatatgccatattcatgcgtccagcattatgaacatattccaacgacgcgccggcgctggttgtcgcataattattactttgatccatgcggataccgtataacagcgcacgatcttccaaagcacttccattaaacgctacctgttgtgttccctgtccacgatcgtttctattaataccgtaggttagggttccatttgatatccatttatccaaaggaatagaaacgttaaaagaaacctgtttatccctggcggcggtattttcacgactatcgctataagaaaggtttaatccatatccaatacccgcgcgattaatagtatatccggcggataatgattggttttttccctgctttccccagtagtcctgctggttggctgacaaataaacactgcccaaatcacccattccctgatttagagttaactgtatttggctacgtttatttagcccagcgttaactgattttttcgctgtatattcgtttgcttccgcaaatgagtagtagcccgatgtagaatagcgatagccagctaacgtcagcgaagttcccgtggtttcaatactttttgcatattgaatacgataagactgcccttgtttacgctgattatctttcagtctggcatcggccagagtcgtatccagagagatagcaccgaaattacctaagccgagtccaaatccggtatttaacgcgcgataattatcagcagcctgtataccagaaagtaaactaactcgattagaaagcccataaataaaggagccttcaccaaaataaggctgataaatattggccccagaacttctgtaacggccaaaagttacctggtattttaattgcccttctctttgcatcatcggcactgaagagaatggctggacaaatttacgctgttgcccgttcttttcggtgatcgtaacctctaaatctccggaaccagaagttgaatagagatcggatataacaaacggcccaggcggcacataaccttcataaataacataattattttggcgaaccgttacccgagcgttggtttgagcgataccacgaataatgggtgcgaaacctcgctggcttcctggcagcattaaactatcggatgaaatggatgcacccgtgaactgtatactgttaaatacatccccgtcagtgaaagcttcaccgagaatcatttggctctttaaccgatgaatatctcgctgaacgtaactgttaatagatgagaaacggctaccccccttattttcttcagagtcatgactataggtagattggtttctgatacgccaggaaccaatattaattccacttcgtacatttaaaaaatagctttggtttttacttgttccattatgattatccgagccggttaaatcatagttcactaaaaatgaagacagcccctgttgccataaatgcgatgaaacggcatctctgacctgaacatctagcgcagcctgcgggatgctgatatccaaacgttgagaataaaaatcaaaaacaacagacgcctgaggaatatattctttaaggtcatcaataatatgttttgaaggaagatcactcagcgtcggagttgacgatatttttacgccaaagcggcggaggtcatccacggttaactgtggtaataatgctttatccgccgtctgaataaatctgacccgcctggtttctttctcatttccgttaagaaatataaccacctgatactcaccgggtaattgaccaccagagtttgaaaaagcgcttaaatcaataacagcttgctctgcatcacttaactccaacgcagataatcgaaaatggtcttgcgccagaaccgaagatgataagcataaaaaaaaggctgaaatgagcgtacaaaataataactttagcgcacctggatttatatttaacataatacttttcagcctcctgctgatcgttcatcttccttttaccgcagtttttgagtgatctccgggctgacaccaccgtagctattaatgctgctccactttacggcacaacccgctaagcccgatggaagtaagaagtgggaaacaccctgcggagctatcatgtccgcgcctgccaaagctttaccattaaccctaatttgtcctagagtgacgtaataattgctggggtttttcacctcaagctggttaccaatacgacgaaacatcaatgatttataagcctcttccgcatctccaatgatgcctttaggccggtaaaacagtttgatcctcgttttaaccgctattaataaagtactttgttcattttcttgcaccgaaggaatagatttcacattcaggtaaaacaccgattccctatcttccggtaagtgaccaccggtgcgcacaattctgagcgtactttctttacctgcatccaaacgaaataatggaggcgtcacgacaaagggaggtttctcaccttttgtattgctattgataaaggattgaattaaataaggctttgtttcatcggaattaattaccgagattgacgcctcttttttatttccatcatagataactcgtgttcctccaacggtgacacctgcccaagccggatatatgaataacattgataatatcaacgttattttcctaataaaaagacacaaattaaataaatcatttattttagatttcataacaactgtccatggtgttaattatccctggcaaatagccatcacaattcgcctgctgccagggaataaatttttatgaaaattaatttatatttttatttataagaaatgtcgaagtttagagtagcctctgcctttcctgctacgccagattgaccattagcgacataagcgactttaaaaggaatgtttacattagcgctattaatagcatccgggtattcatagctagctgaatttaaagatatttgatttccatctttgtcgtaaagacctataccgatcccttcagcgcctgttgcatctaattttaacaacttgtcgtcctcgagatctgccgtaccggtaaaagcgatagacataagaaccggagctccagtaacaaccgggcaacccgttaatttaatatcgaaatctctctcacttccgctaactttatcgcctttattttttatctcgctttttaaaaatgcgcccattgggacagaaagtgctgatccgccagaaatggtacaggttgtttccataattttaccggtaaattttaccgttccgtttgttaccccataagtcgtgctacttaaagacatcaacgtcccagtaattaatgataaaaccacccttcttttcatttacatctccttgacaaataaaataaatatccattttttaaacttcaaaataaaagcgtaaataatttatgacaaaaacaactttccagtacagatataaatctgtactgagataacaatgacaaataacttaaaaaaccagaataaaattttcgataaaaacaagaaataagagctttaaatagctcctatgtttttacttttaaataaccattagcgatttgtaaaatccatttactttcttaattaagattccatccttagccttttaattaatatcttttaaggagaaaattatatgggattttatgattcagatcaaactttaatctatttacagtaaaacaagaaaatgacttaagttaaattgtttttttacaataagttaaagtttaaagtaaataattctttacacttagaagttaattatctctaccttcatctggtctggcctgtgggaattttctgctttatttaattaataatctcccaaaacttaatcatctttgttatctattccgatataaaatgaaataacctactttattagtatatttatttcgagctattaacctgtttaaaccgaggtattatccttaaaaaaaccagataaccacattatttatatgtgtaacattagataatgtctcatctactcatgctaagaaaaccttgtttttcttcatttctcccactggatctaatagccgggataactgagtattcttcagttacatccaccgaggagccttgttttgatggcaatatcaatgagtaaactctctcaatccaacctttcctgattgaagttattgatggctgcactaagttactaagttactaagttactaagttactaagttactaagttactaagttactaagttactaagttatagacatccattttgctcaaagaatacagctctactgttgcaagccaattaacgtttttttagattattattagtacgatagaaacagcatgaccctttttattatcaaacccaagccttacaccaagtcactcttaggtagcgatatttttattgatattcagcaagataagcagacaaatacctattgtttaattcgagtaagcaagcctaatctagttcaagacaatattatttcaccaattaacaggagtgagtcatgtcacagcagccgcttaaacttgttaccttactgggtagtctgcgttccggttcctataacgctatggttgccaaagccttgccgcaattagctcccgctggagtgactatcgaggccctgccttctatccgcgatattcctctttatgatgctgatgttcaacaggaagatggcattccagctagcgtagaagccattgcagagcaaatccgccaggccgatggcgtgatcattgtgacaccagaatataactattcggttcccggcggtttgaaaaacgctatcgattggctttctcgcctacaaaaccagcccttggctggcaaacccgtgttaattcaaacgagttcaatgggccctatcggcggcgcacgctgccaatatcacctgcgccagattttggtcttcctcgacgctatggtgatgaataaaccagaatttatgggcggcgtaattcagagcaaagtcgatgaagagcgcagagaattaaccgatcagggaaccttggattttctgactaaacaactcgccgcgttcagcgcttatattgagcgagttagagtgaagtaagccccattttgcatcagacccggataaaaaaagccccgatctctgcagattcggggccatttttattactcgatcaaataattaatgatcgacaaaggcaatttttagcacaaagagtaacgccacaacgacgacgcaagggctgatttcacgccaacgcccggtgcccagcttcattacgcaatatgcgataaagcctaaagcgataccttcagtgattgagaagctgaatggcatcatggcggcagtcacaaaggccggaaccgcttcggttaaatcatcccatttcactcgagccaggctggatgtcatcagaaccccaacataaatcagcgcgccagcggccgcataagcaggcaccatcccggcaagcggtgagataaagatcaccagcaagaataggatacccaccacaacagcggttaaacccgtgcggccgccgacggaaacaccagaggagctttcgatataagcggttaccgaagaggttcctaccagcgcccctgctacagagctgatactgtcgacgtaaagcgcctgtttcattcgagggaacttgccgttttcatccgtcagacccgctttatctgttacaccaatcagcgtgccagatgaatcgaaaagattaaccagcataaaggagaaaatgacgcctgccagacccagattcaacgcaccggcgatatccacttggccaacaacgctggtgacgctgggtggcatggagaaaataccgtgatactgcacatcgcccaacgcccagccgatcagcgtagttacaacgatggataccagcactgccgcatggatattacgcgaagccaataccgcaatgataaagaagcctagcgctcccaataggacgctgtgggagctcagatcgcccacggcgaccagtgtgtccggatttgctaccactataccggcatttttcagacccatcatcgcgataaatagaccaataccactggtaataccgacacgaaggctcaatggaatgttggcaatcatccaatagcggatgcggaaaatggtcaatagcaggaaaccgattgcgccccagaaaatagcgcccatcgccacctgccatgaaatacccatagcgccaacgacgacaaaagcgaagaaggcgttcagccccatagcgggagccaaagcaacaggtaagttcgccaataatcccattaaaatactgccaaaagcggcgatcaagcaggtagtgacaaaaacagcctgcacatccataccggcaacccctaggatttgggggttaacaaaaacgatatagaccatggtcaggaaagtcgtcataccggcgatcagctcagtgcgcgccgttgttccatgttgttttagcttaaatacgcgttcgagcatcccctgctcaacatcaaggtttggtttactcattatcagagtccacaatagggggtgaatagtcggctgctatcctataacaaaacgcgtcaatgttgagccggatcacactcttttttagctatttttcgcagaggtttgtatcaaatagccccgtttttacggctactccacttaaaaaaaaccgctgattttgacgattttcttactcaatcgactgtatttattaaatttgttattaattactacgctaatcatgacaataaacgtcgcaatattaatccgtgacgttaaagtgggtttaagcgatttttacagcaaggattggtgctatgtctcagattcaatgcgtcatgtttgattgcgacggaacattagtagacagcgaagtgctatgttgccgagcctatgtgctactttttgcccattatggtattcacctttctctggaaagcgtcattaagcgcttcaagggcataaaactctatgaaattattgagtgtgtcagcgatgaatatcatttaaatcagccagttactgaaatggagagaatatatcgacaggaagtcgcgcggctgtttgacagtgaattgcaacctattaccggcgctaactcactgttaaaaaaaataaatgtgccagtctgtgtggtatctaacggaccggtcagtaagatggagcactcactgggactgacagatttacgccatttcttcgctaatcatttatatagtggctacgacattcagcgctggaaacccgatcccgccttgattcaccacgcggccaataaaatgcaggttcccgttgaagcctgtattttagtcgaggactcgctggcaggcgctcaggccggcatcgcggcgggcataccggttttttactattgcgccgatccccataaccagccaatcgatcatccattagtcaccactttttactatatgcagcaacttcctgagttatggcagctaaaaggctggaaactgacgaaaaattagctggcagacagcgccggtttattcctccaccagcgccatgttcgtttaattgcccgcgtttgcgggctgaaacggcgattgataacgttggccgatacatccaaagtcagacaaaaaacaaagtaaatcagggcaacgaacaggaatacctccatcgggtacaccatgctgcgattattaacctgagtagccagaaatgtcagttcattcacgccaactatataggccagcgaagtatcttttatcaatgagatccattgattgataaacgacggcaccatcatgcgcagcgcctgcggtaaaaccacgtaagccaatacctgccaacggttaaatccgagggataaccccgcttgccattggccttctcctatcgctagaatgcccgcttttaccgcgtgagccagataggccgaggcaatcagcgccagcgcacacaccacggtggtaatttccggaatatctacgccaaaaacgatcggtagtaaaaaataggtccaaaaaatcagcataataacggggatagcacggaaaaaccctaaaaccgccgccagtattccgccccatacgccccgcgacatcgccagcgctacaccaagaataatccccagagctgccgacgccgctcccgccatcaggctaatcgccagcgtcagcgccgcgccgcctaatgggccatcggggaacgttccccacaacaaatagcgccagttatccgcaataatcgtaaaatccatcttaatgccctcgcgcaatcaatcgctgttgacgccacattccccaagcctcaatcaacgcaataaccgagatatacaacagagtcgcgacaccgaaggcctgaaaggtgcgtaaagtttcagtttcaacctgacgagatgcataagaaagttccgcgacgccgatcgccatcgctaaagatgagttcttgattatattcatgtattgccccaataacggcggcatagctatttttagcgcctgtggcaaaacgacgtaacgcatggattgccaacccgttaacccaagagcgtgagcagcatttttttgccctttagcgacgccgctaattcccgcacgtaattcttccgcaataaaagccgtggaatacaaagtcaggccaataaatccggccagaaactcaaatgaaggccagggcagtccccatccgggcaaggataattcatggggtgtatttaaccactgcatccataatgcaggcagtaactgaccggcggcgaaataccagaaaaaaagctgtattaacaaaggagtattgcgaaatagcgtactgtaggcgattgccaaccacagaagcagttttaggtggctgtctctggctgcagccagtacaaaacccagcaaagtcgcagcgacgaccgtacaggcggagatccatagggtcagtaaaaagccgtcccatagccagccaatatagggtgaaaccagcaaccaatcagttaaccgatgaaaattcatatacttccgtacccgtcgggttatcgttcaaatccatttggcgcgactctccctgtcctgcaaataacgcccttgcgtaaaacaaataaccccgcattggctatcaatacggggcatccaggctcagtgcatcatcgcaaaaaatcaggctttaggctgttgatccaaaggtgcaaacttaaaatcaccgcgcggctgggcagatttggtttccggcccgaaccagtggttataaatcttcaccgcgtcaccgtctttctccagtttttccaacgtttgatttaccactgcagtcagacgatcctcacctttaggaatcccgatgccttggtattctttggtaatactgaacggagatatttcaaaatcagctttttgcgcggcggggacgttacccaataacccaactaatttggcatcatcctgagtaatagcctgaacgttaccattacgcaaagcggtgaaagccagcggcgtatcatcgtaggaaatcactttagctgtgggataacgctcccgcagggtaatttcttgtaccgtacctttatccgcgccgatacgcagttttccgatgtcttccggcgtttttagtacccctttgcgggctatgaatttctgtcccgtggcaaaataaggcaggctaaagttcacttgcttagcacgttcatcggtaatggtgaagttggcagcgatcaaatcaacttttttcgatgctaatagcggaatgcggttagctgggtttgttgcctttagctctagctttacgcctaaatctttcgctatcgcattcgccacatccacatcgtagcccaccagctttttactttgctcatcgatatagccaaacggaggattgctatcaaaaaccgcaattcgcaccacaccagcctgtttaatatcatccagtttatcggcgtgagccatgccggaaagcgtagccaaactggccaacagcgttaatgtgatcgcctggtgtttcatggatagctcctaagtgattgatgtgctgcattggctataagctatcaatttgttcttaggtcaggaaataatataaaacgctatatttataaccattttaaccaaacgaggaattttgagtatattgggcggggagtcagcgtttggggcaataaaaagcccggagaaccgggccgatagcgttactttttaccttcggaaagcaatttttccagatcgtccccgcccaaatgacggaaatcatgacctttgacgaagtaaaaaataaactcacagatattctggcagcgatcgccaatacgctcaatggaacgagcgcagaacagagcggttagcacgctgggaatagtgcgagaatcttccatcatataggtcattagctgacgaacgatgccttcgtattcctgatctacctttcgatcttcacgataaattcggatggcttcgtccagatccatacgcgcaaaggcatccagtacgtcatgtagcatttgcaccgtgtggcgccccagagattccaggctaaccaacagcggctgatgctggtgggagaatttctccaacgccgtgcggcaaattttgtccgctacgtcgccaattcgttccagttcggaaatagttttgatgatcgccataactaaacgtaaatcgctggcggtaggctgacgtttagcgatgatgcgcacgcaggcttcatcaatcgccacttccatcatattgacctttttatcgccttcaatcactcgctttgccagttcaccatcctggttatgcatcgcggtgatagcatcggtcaattgctgctcgaccatgccgcccatggttaacacctgggtacggatatgctccaactcagcgttgaactggccagagatatgtttattcagattcaggttatccataatacttcccgtacgtataagcctatcccaataggcgtaatgaacgcgatcccgttgcgggcgctctggccgaaagtcaatcttcgaccaaattaacccgcagggtcagtgtaatagcctaatcagtcaggcaatcaaccatagcggccggtgatgtaatcttccgtctgcttcatctgtggcgcagtaaacagggtgtctgtatcactgaactcaataagctcacccagatacataaatgccgtatggtctgagcaacgcgccgcctgctgcatattatgggtcacaatcaccacggtatagtcagacttcagctcgctgatcagctcctcaatacgcccggtagagataggatctagcgccgagcaaggctcatccagcagtaatacatcagggcgaatagcgataccgcgcgcgatgcaaagacgctgctgctggccgccggacagactgtaaccgctctgatgcagcttatctttggtttcattccacagcgccgctttggtcagcgcccactgcacccgctcatccatatcggcgcgggacagattttcaaacagtttcacgccaaaagcgatgttatcgtaaatcgacatcgggaacggcgtcggtttctgaaataccataccgaccttggcgcgcagcagagcgatatcttgcttatccgtcaggatattttcgccatccagcagaatgtcaccttctgcacgctgatccggatacagctgatacatcttgttaaaggtgcgcagcaaggttgatttgccgcagcctgatgggccgataaaagccgtgacctgatttttagcaatatccaacgaaatattcttcaacgcatggaatttaccgtaatagaagttcaaatcgcgaacctgaattttgctgttggtggtctcagtagccatactcatcaagacttctctcttttagctaacgcagcctaagctacgcttttgaatttgggtgacgtatcagtattttttcttcgcgaaaataacccgcgccagaatattcaatagcagaacgcacagggtaatcagcagcacaccggcccaggccaactgttgccattcggcaaaaggactcatggcaaacttaaatatggtaaccggtaagttggctatcggctggctcatatcggtactccagaactgattggagagcgaagtgaacagcagcggtgccgtttcgccggcgatacgggctatagccaacagtacgccggtaaggatgccggagattgacgccttcaatgtaattgcagaaatcatgcgccatttaggtgttcccaaggcgtaggccgcttcacgtaggctatccggtactagcttcagcatgttttccgtggttcgtatcacaataggcacctgtaacagcgccagcgcaataacccctgcccagccggaaaagtgctccattctcgccacaataatggtgtaaacgaacagaccaaccacaatcgacggcgcagatagcaaaatgtcattgataaaacgaatgatctccgccaaccacgatttgcgcccatattcagccagatagataccggccataatgcccagcggagtaccgataaccgtggcccatagaatcaggagtccactaccggcaatggcgttagccagcccaccaccagcggtattcggcggcggcgtcatttcggtaaacagcgccaaagacataccgtctacgcctttggtaattgtggaaaatagaatccacaccagccagaacaggccaaaagccatggtcgccagggataaaatcagcgcgaggcggttcttttgacggcgccacgcctgtttcttgcgacgagtttccagcaaggctgcgttagtttgcatatccatagtggtcatattagcgcccctctttcttagccagacgcagaatcatcagcttcgacaatgccagaacaataaaggtgatgacgaacaggattaaccctagctccatcaaggctgcggtatgcaggccagattcagcttcggcaaactcattggccagcgcagaggtaatactgttgcccggcataaacagtgagaagctgtcgagttggtaggtattaccgatgataaaggtcactgccatggtttcccccagcgcgcgccccagccccaacataacgccgccgatcaccccattcttggtgaagggcagcacaatacgccaaatcacttcccaagtggtgcagccaatgccgtaggcagactctttcatcatcaccggcgtttgttcaaagacatcacgcataacggaagcaatgtaaggaataatcataatggccaatatcacaccggcagccaaaatgccgatgccgaacgccgggccagagaacagcacgccaacgatcggaatacctgaaaggacattaccgacaggttcctgaaaatacttggcaaacagcggcgcaaagacaaacaggccccacatgccgtaaacgatacttgggatagccgccagcagctcaatagcgacgcccagcgggcgtttcagccagtttggtgccaactctgtcaggaataacgcaataccaaaactaacgggaacggcaataattaacgcaattaacgaagtgaccaccgtaccgtaaatcggtaccagcgccccgaattgctcggccggagcgtcccactctttggtccacagaaaggcaaaaccgaatttttcgatactcggccaggaggcaacaatgagggaaataatgatcccgcccagcaggaatagggttattaacgcagccagttttaccagcgcgccaaatatgatgtcaccgtgcttgctcggtgctttgatagtcggcttataaccagccatagactctcttctcatccgggtgttatttccctccccacacggggagggacaattaatggaaccaattacagttttttactgctttattcgtttctatcgagcttagaacaatgctttgcctgaactgtcttttatctgcgttttccaggctgcacgtacctgctcaaccacttcggctggcaaggttgcataatccagttcgctggcctgttttgcgccgtgggtgtaagcccagtcgaagaatttcaggacttcagtgcctttttcagcatttttctggtttttgtgtaacaaaatgaaggtagtagaagtaattggccacgcgccttcagcattctggttagtcaggtcctgagcgaatgttttgctccaatcaacgcctttcgccgctgcactgaagttttcttccgttgggctaacggctttaccatcagcaccaatgagtttggtgtaagccagattgttctgtttggcgtaagcgtattccacataaccaatagaacccggtaaacgctgaacgaaagcagcaatgccgtcgttacctttaccgcctaaaccggttggccagttaaccgtagagccagcaccgattttttctttccattccgcattcactttagccagatagctggtgaaaacgaatgaagtacctgaaccatcggcacgacgaaccactgcaatattttgatccggcagttttacgcctgggttcaatttaacaatagctgggtcattccactttttcacattgcccagataaatatcgcccagcgttttgccgtctaacgtcaattcaccggatttcacgcccggcaggttgactgccagcaccacaccaccaataacggtagggaactggaacaaaccgtctgccgctagcttgtcgtcagacagcggcgcatcagaggcaccgaaatcaacggtattggcgatgatttgctttacgccacccgaagaaccaatcccctgatagttcactttgttacctgtttctttctgataagaatctgcccacttggcatacaccggcgcggggaatgtcgcacctgcacccgtcaggcttgcagcagcgaacgcggacacagttgtcatagataaagtcgctgccacaatgctggctacggtggtacgcatcagtctcataatccctcctaatgggatataggtatcaaactcaaaattgttttcatcagattaagtatggtgcaggagggaaaataggacagtttagtgacagaaaaatgtatgaaatatgacagttttatgacaaatcagaaaagcagcggcaaaaccaccaacagtcataggtttcatcaagacattttgcctaccagccagaaatgaacaaaagcacaaagcgtgatttagaaatcgacgatgacaaacactatttaactaaccgataaaacgctatttattacagaatgtgaccagatactctcatagtatagtcaacgcctaaaattcagaatattagaggataaaaccatgagtatatctatggaaagagtacaacatgaaattagaaccattcatagcactgcagtggaccagaaaaaggtaacatcccaaagtgccaaaaagttatataacttaatgaaagaaataaaaaactcacctcttagctgtagtcaagggtgtaaaacaaacgcaatcaatgatttaaataatttaaataaaatactcactgaacagaattcaaagttggttaataaaaaaagcaaaggaataaatgcattactgaagaaaataaatacagcaaaagtagaagaaaacataataaataatagtatttatagcgttggaaaatcatcatacgtaccaataaataatgaattatatgcttcacaagaacatatctatgaatcaataagtgatgatattaatggcccagcagaacctatctacgaatcaataaatgatgatgttaatggcccagcagaacctatctacgaatcaataaatgatgatgttaatggcccagcagaacctacctacgaatcaatgtatcatgacgttaatagttcaccagaatccatctacaaatcaatgaaagcagtaataacaaataccgaaaaaggtacatattccaaaccatttgataactatagtgacaatatatatcaagagccattttatgataaacaaaaatacagcaactcgttaccaataaatgaattaaataatattgagaaatacatagacgaattggcggaaattgctgatgatattattttcatcagaacgccaccaggaatacgcccccccaacacctaataaaacccctgcatcaagtaataaagaacactttatacagattgttaaaaataataaaatacatatattaaaagcaaaaaattaatatataaataagatatagcgatatttacagtcagctcttagaggctaaaaaattttttgataatcaacgaagcgatacgcaatgaattttcattagtagataataagttgggtaaaaaaatgctgttcagcagatcgagatctcgctgaacagcatattcattagatttatagcccgaaattactcaacggtaaccgattttgccaggttacgcggctgatccacatcagtgcccttgatcagagcaacgtggtaagacagcagctgtagcggcacggtatagaagattggagcaataatgtcttctacgtgtggcagttggataattttcatcccttcactgtcggtgaaacccgcgtcctgatcggcaaagacgtacagcaaaccgccgcgagcacgtacttcttcgatgttagatttcagtttttccaacagatcgttgtttggcgcaaccacaataaccggcatatcagcatcaatcagcgccagagggccgtgtttcaattcaccagctgcgtaagcttccgcatgaatataggagatttctttcagcttcaacgcgccttccattgcaatcgggtattgatcgccacgtcccaggaacagagcatgatgcttatcagagaaaccttccgccagcgcttcgatagttttatccagagacagcatctgctcaatacgcgcaggcagagcctgtaacgcatgaaccacatcgtgttccaggctttccggtttacccttcaggcggccaattttagccaccagcatcagcaaaacggtcaactgagtggtaaaagctttggtcgaagctacgccgatttcagtcccagctttggtcatgagtgccaaatcagattcacgaaccaacgaagagcctgctacgttacaaatagccaaagaacccagatagcccagttctttagacaaacgcagggctgccagcgtatccgccgtttcaccagactgagaaagcgtaatcaacagactgtttggacgaaccgctgatttgcggtaacggaattcagaggcaatttccacgtcgcaaggcacaccagccaaggcttcgaaccaatagcgagaaaccatgcctgagttgtaagaagtgccacaagcgataatttggatatgctggacatcagagagcagcttatctgcgttcgggccaagttcagacagatcgatcaaaccgtggttcaaacggccttccagcgtgtttttaatcgccatcggctgttcgtagatttctttctgcatgtaatggcgataaacacctttgtcgcctgcatcatattgaacctgagattcaatttccgcacgttcgacggcgttaccgcttttatcgaagattttcacgctgcggcgagtcacttcaaccacatcaccttcttccaggaagataaagcgacgagttaccggcagcaaggccagctggtcagaggcgataaagttttcgcctacgccacagccgatcaccagcgggctaccggaccgcgctgctaccagcgtacttgggtcacggctatccatcactacggtaccgtaggcaccacgcagctgaggaataacgcgtttcaccacatccagcaaagaaccgccctgttgctgctcccagtgcaccagatgagcaataacttcggtatcggtctcagaattgaacttatagccgcggctaatcagcaattcacgtaatggttcgtggttttcgataatgccgttatgaacgacggatatatattcagaaacatgcgggtgagcattcgattctgaaggttcgccgtgagtcgcccaacgcgtgtgcgcaatacctgtgccaccgtgcagttccgtgctttctgccgcatcggacaaagcctgaactttccccacgcgacgcaaacgggtcatattacctttggcatcaactaccgacagaccggcagagtcatagccacggtattccaaacggcgcaagccttcgatcagaatctcagcaatatcacgttgcgctactgcgccaacaattccacacatcagtttaattcctatttaaggttctttgaaaagaacccattcgatgccagtgacctgattttccggattttccgggttccccgagcctgtagagtttggggattattatgttttgctcgatattctcagccgttagtcgctaaaaaaatcgagcaaaacattcctttcatggcatgacaccatgaaaggatattaatcagctttttttgaccggacgcttccagccttggatattgacctgcttaacgcggctcaataccagctcattttcagccacgttacgggtgacagtagtaccagcgccgatagtggcacctttttcgacggtaacaggggctaccagttgggtatcagaaccaacgaagacatcatcgccaataatggttttaaacttgttcttaccatcatagttgcaggtgatggttcctgcgccgatattcacatctgcgccgatttcagcatcgcctaaataagacaggtggccagctttagagcctttacccaaacgcgttttcttcagttcgacgaagttgcccacgtgagccccctcagccagctcagcgccaggacgaagacgggcaaacggcccaacggtacaggcgttatccaaacgagcatcttccagcacgctgtaaggactgatttcgcaatcatcgccaatcacgcaatttttcaacacacagccgctgccgatgcgaacccgattgcctaacgtcactttgccttcgatgataacgttggtgtcgatggtgatatcacggccatgagttaactcaccgcgcagatcaaagcgagcaggatctaacagcattacgcccgccagcagcagtttttccgcttgttcagactggaaatcacgttccaaagcagccaattgcagacggttattaacgccttcaacttcacttaggcgggaaggatgtacggcttcaatctttttaccgtcagcatgtgccagagcgataatatcggtgatgtaaaactcaccctgcgcgttgttgttatccagcatagacaaccagcgcttcagatcgcgcccgttagccaccagaatacccgtgttaacttcgttaatatcacgctgggcttcgctggcatctttatgctcaacgataccgaccacttcgccgttttcacgcacgatacggccataaccggttggatcgtccaacttaaccgtcagtagcccgataccgccttctggtttagccgcaaccaaacgctgcaaggtatccacagagatcagtggtacatcgccatacagcatcaaaatatcttcatcatcagagaaatgaggcgcagcctgctgcatcgcatggcccgtacccagttgctcagcctgtaacacccagtttaatgccggatcgctcagcgtctttttcagtaaatcgccaccgtgaccataaaccagatgaacattgctggaacccagcttcatcgcagcatcaataacatgctgaaccataggcttgccggccaatggatgtaataccttgggaaggtcggaatacatgcgcgttcccttgcctgcggcaagaataactacgctcattgtgctgttagacataagcaacctgataactccaattgaattgacggaagtaaacccgtttaccgataaaattactacatatttctcagcgaaaaacgccgcaaacccgcaccgttaaaggattgtttcacttagcgaaaatccaaaaaaaaagcgagagatactgtctgcgatcgacgacgttttaccacttttatcggctgagaaaacctaactctatcgcgcaataaaacacttattttacggcaagaaacaagataattcagaaagaaaacgccttcctcataatcaactctcgccgaaataagacatccccccaaaggctaacgatgcttttgcatcgaaacatcattaccgactttatatatccgataatagttatacggatcgcaccttattaagtaaggtttaacaatcttaaaaacacaatgaaatgaccgattgaataggaaaaaccgagaggcgagatcgaagaataaagagaatcatgggattcgcagaaaagaaaaatgccagtcagcttgcgctaactggcaccttattactctatcagtcaggccgctttaggcaacctgactcgataaagttacatcgctttacgggtcagttcgattacgcgtaatttcgcaatcgccttcgccagttcagcggatgcctgagcatagtcgacatcaccgtgggaattgttgatatgggcttcggctttgcgcttagattccagcgccttagcttcgtccagatcggttccgcgaatagcagtgtcagccaatacgatcacaacgctcggttgcacctcaaggatgccgccagaaagatagataaactcttcctcaccgaactgtttaacaatacgtatcatgccaggcttaatggcagtgagcagcggggcatggccagggaaaatacccagctcaccttcactacccgtcacctgaatcttttgcactacgcctgagaacattttcttctcggcgctcacaacgtccagatggtaagtcattgcagccatgtcaccctccagtcaacagcgttacagtttcttggctttttccactgcttcttcaatggtgccaaccatgtagaacgcctgctccggcaggtggtcatagtcgccattcatgatgcctttgaaaccacggatggtatctttcagcgacacgaatttacccggagaaccggtgaagacttctgccacgaagaacggttgagacaggaagcgctggattttacgcgcacgggatacaaccagtttgtcatcttctgacaactcgtccatacccagaatcgcgatgatatctttcagctcctggtaacgttgcagaatagactgcacgccacgcgctacatcgtagtgttcctgaccaacaaccaatggatcaagctgacggctggtggaatcaagcgggtcaaccgccgggtagatacccagagaggcgatttgacggctcaataccactgttgcatccaagtgagcaaaggtggttgctggtgatgggtcagtcaagtcatccgcaggtacgtaaacggcctgtacggaggtgattgaacccgtcttggtggaagtaatacgttcctgcaacacgcccatctcttctgccagcgttggctggtagcctaccgcagatggcatacgacccagcagtgcagatacttctgtaccggccaaggtataacggtaaatgttatcgatgaacagcagtacgtcacgaccttcatcacggaatttctccgccatggtcaggccggtcaatgctacgcgcagacggttacccggtggctcattcatctggccataaaccagtgatactttgtccagaacgttggagtcagtcatttcgtggtagaagtcgttaccctcacgagtacgttcacccacgccggcaaagacagaataacctgagtgctcgatcgcgatgttacggatcagctccatcatgtttactgttttacctacacccgcaccaccgaacagaccgactttaccgcccttagcgaacggacaaatcagatccattaccttgataccggtttccaacagatcctgcgagctggcaagctcttcgtaagaaggcgcttcgcggtggattgcccaacgctcttcttcaccgatggcacctttcatgtcgattgggtcacccaatacgttcatgatacggcccagagtagctttacctactggcacttcaattgggtgttccaggttgattactttcaacccacggctcagaccatcggaagagcccattgcgatacaacgaacaacaccgccgcccagctgttgctgaacttctagcactagcttggaagccgtgccttcgacctcaagggcgttgtacacttttggtacagcgtcttgggggaattcgacgtccactacggcgccgattacctggataatctttccagtagccatcttgaatcctctacgtaatacatttacccgtcatacttcacattgctgacgcgttggctgtcttctttcactcccgctgcttacttcaagtaaacacccggaggctcgctcagttgccgccttcccgcaatatgaactatttggggtaatagcctggttaaaccgcggaggctcccccgacgatctcggtgagttcctgagtgatgctggcctgacgagccttgttgtaaaccaactgcagctctttgatcaggctaccgccgttatcggtggcggctttcatcgctaccattcgcgcggcctgttcgctggccaggttttcaacgacgccctgataaacctgtgattccacatagcgacgcaggagggtatccagcaacgctttaggatcgggttcatacaggtaatcccaggatttcttcttcagctcgccgtcttccgcaggcggaagaggtaacagctgcatgatccgtggttcctgagacattgtgttgataaacttgttatttactacatacagtttgtccaggcggccttcatcgtaggcttgtagcatcactttcaccggcccgatcagttctgacagagaagggttatcccccatgccagtaacctgagcaacaatattgccgcccacggaaccgaagaaagatgccgctttggaaccaatcagggcaagatcgcactcaacgcctttctcggaccaagctttcatctcagccaacagttttttgaacaggttaatgttcaaaccaccacatagaccacggtctgtagaaaccaccagatacccgacgcgtttcacttcacgttcgtccaggtaggggtgtttgtattccagattacctaacgcgaggtgaccaatcacactgcgcatcgtttctgcataaggacggctggccgccatgcgttcctgcgatttacgcattttggaggcggcgaccatctccatggctttggtgatcttttgcgtgttttgcacgctggcgatcttggaacgtatctcttttgcgccggccatttctgcttctcctcattgccagacggcctgctttcctaacgaaaagcaggaccgaatagcgttaccaggactgggttgccttgaatgtgtcgaggatgcctttcagcttggcctcgatctcatcgttatacgcgccagtttggttgatttgttgcagaagctcagcgtgctcacggtcagcaaaagctaacagcgcagcttcaaagctacccaccttcgccagctcgatatcacccagataaccacgttcagctgcgaacagaaccagagactgctgtgcgacagacatcggcgcatactgtttctgtttcagaagctcggtcactttctgaccgtggctcagctgtttacgtgttgcatcatccagatcggatgcgaactgggagaacgcggcaagttcacgatactgtgccagagcggtacggataccaccggacagttttttcatgatcttggtctgcgctgcaccacccacacgagatacggagatacctgggtttaccgcaggacgaataccggcgttaaacaggctggattccaggaagatctgaccatcggtaatcgaaattacgttggtcggaacgaacgcggaaacgtcacctgcttgcgtttcgatgatcggcagagcggtcaaagaaccggttttacctttcacttcacccttggtgaatgcttcaacgtagtccgcgttgacacgcgcagcacgttccagcaaacgggagtggaggtagaatacgtcgccaggataagcttcacggcctggtggacgacgaagcagcaaggagatttgacgatatgcaacggcctgtttggacaggtcatcataaataatcagcgcatcttcaccgcgatcgcggaaatattcacccatggcacaaccggagtaaggtgccaggtattgcaatgctgcagattcagacgcggtagcaacaaccacaatggtgttagccaaagcgccgtgttcttccagtttgcgcactacgtttgcaacagtagaggctttctggccgatagcaacatacacacatttgatgccggaatcgcgctggttaatgatcgcatcaatcgccagagcagttttaccggtttgacggtcaccgatgatcaattcacgctgaccacgaccaattggaatcatggcatcaacggatttataaccagtctgaacgggttcatcaacggattgacgttcgataacgccaggtgcaatagcttcaacggctgagaagccgtcgttttctaccggacctttaccatcaataggttcacccagagtattgacaacgcgacccaacaggccacgaccgacaggaacttccaggatacggccagtacatttaaccttcatgccttcagcaagatcggcgtacggacccataacgactgcaccaacggagtctcgctccaggttcagtgcgatagcgtaacggttgcctggcaatgcgatcatctcgccttgcataacttcagccaaaccgtgcacgcggatgatcccgtcgctgacggaaacaatagtaccttcattgtgagcttcgctcaccacattgaactgagcaatgcgctgcttgatcagttcgctgatttcggtggaattcagttgcatatgctccagtccccttaagactgcaagacgtctgccaggcgttcaagacgaccgcgaacgctgccatctatcaccatatcgcctgcgcgtattacgacgccggccattacagacttatcaattttgcaattcagcttaactttgcgtgacagacgtttttccatcgcagcggcaatcttagcctgctgttcgtcactcagtgcactcgcagaggacacttcaacgtcgacggtagactctaacgaggcacgcagttgaataaactgctgcagcacctcaggaagaaccagtaaacggccattctccgccataactcggataaagttctgtgcgggcacatcgagttgatcaccacaaacggcaataaacgttttcgacattgattcaggtgcaactgcacctgaaagcaattcggcaatctgttcattgcgcgttacctgagcggtaaacgccagcatttcctgccaatgttcaaccgcctggtgctcaacagcaaagtcaaaagctgctttggcgtaggggcgagctacagttacaaattcagacatcagcccctccctccttacagttcagcgaccagtttatcaacgatgtcgctgttagcagcttcatccacggaacgttcgatgatcttctcggcgccagctattgccaacatcgcgacttgcttacgcaactcttcacgagcgcgcttacgttcggcgtcgatctctgcctgcgcttgcgccacgattttgttacgttcctgttcagcttcagttttagcttcatcaaggatctgagctttgcgtttagacgcctgctcgatgatcacctgagcttctgctttcgctttcttcagttggtcggtcgcattggcttgcgctaagtccaaatcttttttggcacgctctgcagaagagagaccgtcagcaatttctttttgacgcttctcgatggcagccataattggcggccatacgtacttcatacaaaagatgacaaacaggacaaacgcgatggcctggccgaggattgttgcgttaagattcacagcacaatgcctctttcaaagttaatagtttggtgtagtttcacagtagagaaaatctctacttacgcgacagcaaacatcacgtacagacccagaccaacagcgatcattgggatggcgtcaaccagacccatgacgataaagaactgtgtacgcagcagaggaatcaggtcaggctgacgtgcagcgccttccaaaaatttaccacccaggatgccgataccgatcgcagcaccgattgccgctaaacccatcatcacagcggcagccatgtacagcagatccatattcaggttttccatgacagtctccagttatttcagttaaaacgcagtagtgttataagaaaatcagtgctcttcggatgccatcgagagatagacaatcgtcagaaccatgaagataaaggcttgcaacgtaataatcagtatatggaaaatggcccaaggcacacttaacaaccactgagaccaccacggcagcaggccagcaatcaggatgaagatcaactcacccgcatacatgttgccgaacagtcgcagaccgagtgaaaccggtttggacagcaggctgacaccttccaggatcaagttgactggaatgaataccgggtgattgaacggctgcatcgttaattcttttacgaagccgcctacacctttcattttgatgctgtagaacaggataaggatgaaaacacccaaagccatagacaaggtaatgcttacatcggcagtaggtaccacacgcagagccggtaatccaaagacgtgttcaccgatgaatggcagtaaatcgattggtagcaagtccatcatattcatcaggaagacccagacaaacacggtcaacgccagaggagcgatcactttgctcttgccgtgatacatgtccttcacgctgctatcgacaaaaccgataatcaattcaacggcggtctgcagtttacccgggacgccactggtggcacctgcagcaactttgcggaacaaaagcagaaaagctaaccccagcacgacagagaagaacaatgagtcaatgttcaacgtccagaacgatgcagggccagtagagtggggattgaccaactcgaaggtacgcaggtccaactgaaggttattcagatggtggcctatgtagtcccttggagtagagatttctcctgatgcagacatgatgcctcttacccttttttagttaaatacgataactgttttaagtacggtaaccgctaattacggccggtgccaatatctgcacaatcagcaccgataaataggttaaaccgagtgggacaaacgccgctttaaacagccccaaagccacaatcagtaaaattatcgtaatgataacttttaacccttcgccaatggcaaacgtccaagcaacacgacccggagccgctgtttttgcctgatggcggcaagcaaacagcatgaacatggcatttggcaaccaggccgccaaaccccctgcgaatgcagaagcactccattccaagcctttcaaaccgaaagcagcgctgagaacaacaaaagtcattaactgcaaaaacagcaactttcgcgcaattttcccgttgtaaagggatacaggcatgacgtttgttctctccctacccctcgatgggtatactgagtgacgtataaaactgcctttgccccagagagtcaagcagcaaaaaacgagcaaattatacggtgcacaccaacgaattcaatcgataagtagcgaaaaggtgaacaattatttaaattttcttctttcggactcttttcacaagaaatccctcggaataaatctcacattattttgtctgactattccactggctctcaataaagcgtgctgttgctcacagaacttaatattatctatttatatcgagaacgcttttctttgtctttaaccaaaagagccattaaatacatatataaatcaaagaattgaatttaaacacaccgtaaacatcttatctaccgaaccaaaaccttctgttgacattttcgataataatattgcaacaagttaaacacataaaaacgaagaataatgaatcaaagtagtttcattcgtgattatatccctgcgtccaacctgatatgtcaattcccggatacattcttgtaataatcaggtgaatatttacacatccaccgaattaattaactcagacaattaacccgggtgaaatacctaattccgaaaaactttattgctttttttgataaataacaaacttagtttggtttaaggataaccaaatgccgttcgccatctaactcaggaacctgtagtcgaatcacagactccaattcaataccttgtggcaaagtcgataattcatcatcagggcgtacgcctttcagcgcgtaaaaacgcccttcaggcctggctggcaggtgatggcaccaagacagcatatcgtccaaagaagcaaacgcacggcttatcacgccatcaaacccaggttggccgctaaagtcttccacacggctctgcacaggctcgatattagtcaaccccaactcatgttgtacctgacgcaaaaagcgcacacgctttccgaggctgtctagcagagtgaaatgtgaatcagggcgcacgatagccagaggaatgccaggtaagcccggcccggttccaacatcgataaaccgctgaccttgcaaatgagggttaaccacaatgctatccaggatatggcgaaccagcatttgttcagggtcgcggacagaagtcaggttataagccttgttccacttgtgcaatagctcaacatagccaataagctgctgtttttgttgatcgggtaacgaaattcccgcgcttttaagcaaggattctaattttttttgcaccacaatttcctctggccataagcggcgtagccagcgttaataagtcatcgaaaaagagatttgcctgcgttagcaggcggtcgctggtgcgctaagtctagcgcaccgcagaatacattcaggcactacgacgaagtaagccctgttttttcaaccagaccagcaagatagagattgcagctggcgtaacgccagaaatacgcgatgcctggccgatcgagtttggtttatgatcgttcagttttgccgtgacttcattcgacaaacctgaaacctgactgtaatccagatccgcaggcagcaacgtgttctcattgcgcagctggcgttcgatttcttcctgctgacgggcaatataaccctcgtattttacttgaatttcaacctgatccgcagactgaggatcgctcaatgctgggccgaatttgtccagtgaagtcagcatgcggtaatcgatttcagggcgtcgtaacaactcttcgccgttggcttctttggacaaaggcgctttgagcaacgcgttgatttgctcgatgttctctgagttcggatgcaccatgatatcgcgcagacgctggcgttctctctcgatttgctcgattttctggctgtaatgagcccagcgagcgtcatcgactaaaccaagcttacgtccagtttcagtcagacgcagatcggcattgtcttcacgtaacatcaagcggtattcagcccgagaggtaaacatgcgatagggttctttggtgcccaaagtgctcaaatcgtctaccagcacaccgaggtaggcttcatcacggcgcggtgaccagccttcgtcttcgttggcaaagcgacctgcgttgaggccagcaagcaagccttgagccgccgcttcttcgtaaccggtggtgccgttgatttgccctgcaaagaacagcccctgaatatatttactttccagagtcggcttcaaatcacgtggatcgaagaaatcatactcaatagcgtaaccaggacgaatgattcttgcgttttccatacctttcatcgaacgaacgatttgcatctgcacatcaaatggcaaactggtggaaatcccatttgggtaaatttcgttactggttaagccttctggctcaaggaaaatctggtgcgcattacgatcggcgaagcgcatgactttgtcttcgatcgaggggcaatagcgtgggccgatcccttcaatgatcccagcatacattgggctacgatcgaggttattacggataacctcatgggttttttcattggtgtaggtgatatggcaagccatttgctcaggatgctgtgaggcattcccgaggaatgaaaataccggcaccggatcgtcacctagctgcggtgtcaattggctgaaatcgatagttctggcgtcaattcgcggtggtgtaccggttttcaggcgattcactctcaacggcagttcacgcaaacgctgtgatagcgagatcgatggaggatcgcctgcacggccaccgctgtagttttccagcccgatgtgaatcttaccatccaggaaggtccctacggtcagcacaacggctttggcgcggaatttaagccccatctgggtgacagcaccgacaacccgatcgttttccacaattagatcttcgacaggttgctggaagatcatcaaatttggctgattttccaatgcggtacgcaccgcctgacggtaaagtacccgatcggcctgcgcacgagttgccctgactgcggggcctttgctcgcgtttagtatcctaaactgaatgcccgcctggtctgttgccatcgccatcaacccgccgagggcatcgatttcttttaccagatgcccctttccaataccgccgatcgctgggttgcaagacatttgccccagtgtgtcgatattgtgcgtcagcaagagggtctgacgtcccatgcgtgccgctgccattgcagcctctgtgcctgcatgaccaccaccgatgatgatgacgtcaaattgatctggataaaacatggtactgcacctcgccgttatgcgaatgatcgttggtttgccctggggtgggggattctactcaagtttagacgatcgaccaagtgccttgggatcgcccttaattaaaagaagatctttttatttaaagatctctttattagatcttctattaggatcgcgatcatctgtggataagtgattattcacaaataagatcatgggattaaggaggatcgtttgctgtgcatgatcggtgatcctattgcgtataagctgggatctaaatgccatgttatgcacaggtcacaatacgtacgaaggttgttatagggataactaccggttttaccctgcttataagcatagttatccacaatcgttcgcgtgatctttgagcgaattagagtaaattaatccactttttaacccattcctcagctggatcctcaggaatctcatgttgagtgacgtcgatctcgagtatttcaccgatccgtttagccccttttgcgatcaactgttgatcaagagagcggatcgcaccgcaaaaagtgtcgtactcggaactgccaagaccaacggctccaaagcgaacctgagataagtcgggttgttgttgctcgatttgttcaagcaaaggctgaagattgtctggtagatcacccgctccatgagtcgaggtcaccaccagccacaggccttgcggcgttaattcatctaattccgggccatgcaaagtttcagtggagaaacccgcttcttccagcttctcagccaaatgctcagcgacatactctgcgctgccaagagtgctgccactgatcaacgtaatatcagccataaacaacccaaccaaagtaaagaggcggtattgtactctgtgaatcagctgggatctacctgtggacaatatgggtatagttatttcttcattatggcacgatggtacgcataatggggttctgtagtgaaattaacgtctcggtagactggatctcatcaatagtctggatcttgttgataagtacctgttgcagcgcatcaatggatcgacacatgactttaataaacacgctgtagtgcccagtggtgtaataggcttctacgacctcttccaggctctccagttttttcagcgctgaggggtagtctttggcactttttaaaataatgccgataaaacaacacacatcatatcccaaccgttttgggtcaacgtgaacgcaagccgcggtaatgatgcccgcctgcttcattttctcgacccgaacatgaatagtgcctgggctaacggcaaagtttttggctaattcggcataaggtgtccgtgcattttccattaatgcgttcaggatgccgcgatcgagattatcgatctgatatatttcgctcatatttaccccctatttttatcgataatgcgtatttaaccgataaaaaatgaatgattaaaagtgaaaaggcaatattagttattggatattgaattataggtctgttctgttgcttaatcgatgtcaagccaaacggcatcctgataatcaagcattgagaaaacagccatgaaaaaacaatttatccagaaacagcaacaaatcagcttcgtaaaatccttcttttctcgtcagttggaacaacaactgggtctgattgaagtacaggctcctattcttagccgcgtgggtgatggtactcaggataacttgtctggttctgagaaagcggttcaggtaaaagtgaaaagcctgcctgatgcgacttttgaagtggttcactctttggctaaatggaaacgtaaaaccttaggtcgtttcgatttcggtgccgatcagggtctgtacactcacatgaaagctttgcgtcctgatgaagatcgtcttagcgctattcactccgtttatgtggatcagtgggattgggaacgcgtgatgggtgacggcgagcgcaacctggcttacctgaaatccacggttaacaagatttacactgctattaaagaaacagaagccgcagtgagcgaagagtttggtatcaagcctttcttgcctgagcagattcatttcgtacacagcgaatccctacgcgctcgcttcccggatctggatgctaaaggccgtgaacgtgcgattgctaaagagttaggtgccgtattcctgattggtatcggtggcaagttggcagacggtcaatctcacgacgttcgtgcaccggattatgatgactggacgtcgccgagcgctgaaggctttgctggtctgaacggtgacattattgtctggaaccccattctggaagatgcgtttgagatttcttccatgggtatccgtgtggatgccgaaacgctgaaacgccagctggcgctgaccgcagatgaagatcgcctgaaactggaatggcatcagtcactgctgcgcggtgaaatgcctcagactatcggcggcggtattggtcaatcccgtttagtgatgttactgctgcaacagcaccatatcggtcaggttcagtgcggcgtctggggcccggaaatctgcgacaaagtagaaggcctgctgtaattaggcgtagctttaaccgatagaattatcaggcagcccggcgttatcgccgggttatctattttgtttcctgtcagggtgttcttcgtccctattatagtttcctcttttttatcttctaactgtctattgctacttcaatctcttgcctttttaatcacttattcgccgaggcaataaagaatagttcggctatgccgatagtttctgcgattctggaacttatatcttatatacagtcgacctgacgctcagatgccctttcctgcgctaaggcaaataaggaaattgacgaagatggcatccaccttccgctcccttgctccatatatagaacaacgtgaacatttacgcttattactggcttcccatcaatttgatgagcttgattctctgctggatgcctcagctcagcgttggctggatagttcttctcaaccctttgattatgattggatcattagcacttttttcgatccggctgaggttgctacagacacgctttcaaacctgaatgcctggattaaacacaagcccatgtcttatcacgggcgtttgctgcatggctgttattgggaggcagcggcggcgcggattcgtacctccaacggcggagaatacgtctctaacgatcgctgggttggcgctcaactcgcgcgtgatttagggctgatctcctatctgcgggctatttcgctgcatgagcgcccggcttacgcattgcgtcggatgttacgtttaaccgcgtatctgggcgagccgcagtggttatacgatttggctcatgggcatgaaccaacaaattacgtgcaactccaggctgaaaccgagtcggaggtatgggaagcgggtctacgtcgtctgttggctgaaggcggcgatttggcgtctattccacaggcattgcctgggagtcttcctgcccgtcggtctgagaatgttaaaacctattggctcaacgcgaccttggctattcgtcctcaggacgtcggcgttcgcaatgaatatctttacttcctttatccgcgttggggcgggagccatgagcaaatggctgaatttatcgaagggccggtttgtgccgaactcagcgagcaaaacctcaatcttctttgggtcaccaaggcttgggatttcctcggttattccatttatttccctgataaagagcaaaccgacgatattgcttactgctgtgatgcgtttgagcaactgttagcgttggatcttgaagaagatcagcgtgcgagactgttgtatcaatatgctaatttcctcgcttattatggtaatcaggacggtgtctggcagccggaaaaaatgcagcgttgttacgatctgttagtgcaagcctggcaaatcaacccagctatagccaatccgcaaacggggctggatacattgatgagctgcattaatttcgcgaatatcaatgatagccataatttattaccgcaatggttggaacggttacaactatggggaaacgataaatacgcggtgatgttggcggggatcgccagtaaattcggtctgtacggcataaagaaaggccagtttaatcatcagaggttattggctcgagcagcacatctggactctgaagatgtggatgtcgggcaagccgctgcgaacctgtttggttcggtatctgaagaggctggaatatatctgctacaacaggcctgcgagtggggcgacacttcggcaatggcgacgttatcagacgtctacgccggtgtgttatcccgccagaatggccgtgatatggaagcctataaaaatagcgaattaaggacgtactggatggaacgagccgcagacggcggcgacgcgacctgtcagtacaattttgcctatgaaattattgaagataatgagcaactcagcccagagcagtatcagcaggctagagcattactgctaaatgccatgaatacgccgaatgtgcgccgagacgtatgggaacgttcggcgcgtcgattagcgacattattgatgtttagcgatattcaatatgatatggaactctgtctcgacgttgtgctgcctgcgctgtggagtgatgaagaagagccaaaccgcgtctttgctgccggttattatgcgctggcatttcatttgggcgcaggatgtaatcgtaacagctatctggcgaaagtctggctggaacgtgggttggaaatcgatcccgatgacagctatctagctgaccgcgctaccgaaatattccgctataaagagttgttgggcggcgttcgcgccaaaatggggttcggcaaagataaaaaactgatggatcaacgcggatataatctgacatttaatgagtaagccgcaggttcaggctattgcaggaaaaaatagtctgctctgtttcatcatcattacttctctatagtgaaaaccaatatcaatatatagagaaaatcagcccggttattaccaccagcgtcatttccgggctgtttgttatctggttggaggcagtttcagtctgctttcttatttatcgcctatcctcatcatagttagagatttaaaaaccatataaacaacatggaaggttaaatgctcgctatggctctatcacacgctattcgccactatttacatgctcgtccgcgttttttgctttccgtcggcgctggcgtagtcagctttttagtattgccgtctgatttgagcgttctgttccgtttgatggctagctggaatctaggggcgtggatatatctgatttgcctgtggttgctgatgttacgcactgagtcgacgcaggtcaggctggtagccaaagttcaggatcaaagcgccagcgccgtgctggctattgtctctatggcctgtttggtcagtattctggtgattctgtttgctctgagcaaagccaatacgttatccgatgggatgaaggcgctgaatctgttgctaacgggaactacgttatttgtgtcctggttgctgttgccaaccgcttttaccatgcactatgcccatcttttttatctggaaaggccaataccagaaaaaacgctgccgctgattttccccggggatatcaccaaacctacttattgggatttcctttatttcacctttaccatcagcgtggcgtcgcaaacggccgatgtgtctatcggcagctcagatgttcgccgtatcgttttgcttcagtcggttttatcttttatttttaatatgacgattctggggctgtcgataaacgtcggtgccggattgctgaattaagaatatacgtcgattaacgctgccagcggcgcatcaggcgactttttaatccggtatcaaagcgccagatatggtcgaatatccgcatgattcctggcttgccataggctgacatcgcaaccgcatggaaacgatgttggtgtgcttgctgttggattttgatgcgtcggattaattcttccggcaatcgctgcgccacaaaatcggaaataatcaccgcgtcggcgtcataccattctctgtcgtccattttggtcagcgttgcggataagcaggctgccagatctgttccaccgcgaaaacgctggctgaggaagcgaattgcctgttcgagtccgctggacgcggagagctcgtagtgaatgatttctgtcgcgaataacataatgtagcaacggcggttgtcttccaatgcgatgcgtagcaacgccaggcaaaaggctttagcgcactgttcattgaatccgcccatcgatccggaagtatctacgcagacaataaaagggccgcgcggctgttgatcgctatttttcaaactgactggccgctgtaactgctgttcttgccaggcatcgccctgtagccgataagtcagcaagcggcgttccaacaggcgacggtaaaactcgaattccagctcgctcatgcctagcatcaccagttcggtcggcagtaaacgtagaatgtcattactttgatgaataccactgacttcctcaggcacggcgtctggcattcgcaccatcactgagtaaggttcgaagcgagcatctggcgtcggtaatgccttagctgaacggctacgccccaactgttcggccagtttttgtaattccggctgttgctgcaaaaaatcaccgtactgcagtaataactgataatccccgcgctgtaattgtccctgactcatatcccacagtctgcctgcggcggtgtcgttatctgccagtatcggctccaaggcgccggtcagcgccagccgctgctgcaattcggccagtagctgctcacgttcctgttctaacagctggtggtgcagcgtaacggtttgtaccgttaaactaatgcgccagcgttgtaaaaacagcgtttgcaggctatcgccgtggggaggattattggccagatcggcggcttccagcatggatcgcgcctgagtcgcgaaaggagaatggatcttctccatattttccgccacttcccaaacctgctgataaaaggtcacgctgtcctgaagttggcagcgctgatagagcgtaaattcgttcgccagcgccggtggcacctttgcttcctgaattcgttgctgcagtttgagtttccagccgggaatatctttcatcagggcgcgtttcattcgagggaacttctcaaagaaaatagccagctgtggcgcggccaacagaccgatcaccagttcatctatcagttggttttcactgatagacagcagcatatccaacgttgccaagctgagcacggctattgcccacgcattttttggtgttgctgtttcacctgctcagcaacttgtagcaagctggcttcaattttcgccagccagcttgaaggtgtgaacaggcagggttggtgctggctaaactgtctgcgtttttctgagagacgaatttccaactcactcatttgagttaataacgattctggtacagctccggcggattcacccggcagagaaacaaccgcgccctgacgactaacgtccaaaataaccaggtgctggcggtcgtcaatttcggcatcaatgctctgtgcgaaaccgacgccattcagtttggcacgcagtacgccgcctttgtttagccattgcaccagagcgtcccgctcgatttgcagatgattgacttgaatatcgtgcaaattcagcggtttttgtaggaaaaatgtcaaagttgcatcggtcagattttctggcaaagaatattggggcttacggctgaatatgccgctttgctttatcaacgtgagcgcttgccgatcgctttgctgttgctgatgttgcagccattgagcctgaatatgttggagctgagtgataagcagctgttgctgatagctttgctcacataacagttgttccaactgctgctggagtagtttgagagagttaaggtcatgccacaggcaatctttcagtaaaatcatatcgataggcgcaatggcatcgcgaccgctgaaaaaggcgctggcttgcagcaagcgcagggcttttttccaacgtcgatcagaaacataaggcgcctgctctaaggcacctaagcgttgacgtaattgaaaaataagttcgaaacaattatctggcagcgtaattttatctatctgtggctgccactgatgaaactcttcatcggtgatactaagattttccgccaccggattatggttttcgttttgacgcgttaatagcaatgagcggaagttttgtttttcctgcactcgatctaaccacaggcgaattagcatacggtcataaagagcctccaaactgctatcggcatcgggcagttcgttggatgccgtaaccaacagacgcattggaatgctttcttctttgtcaccgttgcgaaaacgccgttcgttaatcgctgtcagcaaagtattcagaatcgccgggccagctttccagatttcatccagaaaaacgatttccgcttccggcaaataaccgtgggtcattcgctggtaacgcccctcttctttcagtgcctgaatggatagcgggccaaagacctcttccggcgttgaaaaacgcgtcatcaggtattcaaaagccctggcattacggaaggcaaacttcaggcgacgggcaatcagacttttagcaattccaggtgggccaagtaaaaacacgctttctccgctcaacgcggcgagcaggcataagcgtatcgcttcctgcctttcatacagtccggtttccagcgcattacttaaacgggatattctgtctgctaattgcgttgattgcgccataattatcctaaacggtcgatgcgtgaactgatatttacccaagaggtagagattaaaccactttttttaatgttatagcttcttgattagtaaaatttttatgttattgatgatgcttacctcatcatttattgccttctttatctcccgatttaagggtaggcaatcagtttaaatcgtgcatactgtgcgccttttggtgagcgtcaagggacagagaaccgtcggttgggttcttaaacgcacgcatcagcttatggatgttctagcaaaaagaaacaaattatgagcacagaacataaacgatctttatcggcagtaaccctggcagcaataggggtagtgtacggtgatattggtaccagtcctctttataccttaagagaatgtttttctggtcattatggttttgacgtgcgtcctgacgtcgtatttggttttctctctctgatattctggatgttaatcctgattgtctcgctaaagtatcttacctatgtgatgcgagccgataacgccggtgaaggcgggattttaaccctgatgtctctggccggcagaaacacgtcctcccgcgcaacgtcgatattggtcatacttggcctgataggcggcagttttttctatggcgaggtcgtgatcactcccgcgatctcggtgatgtcggcgatagaaggtttggaaatagccgcccccgccctcgatccttatatcgttccctgttcaattgccgttctgactttattgtttgtcattcaaaaacacggtaccggtagcgtgggcaaactctttgcgccggtcatgttagtttggttcctgacgttagcggtgctgggtattcggggcattatggataacccggaagtgctcaatgcgatgaatcctaagtgggcgctggccttctttgcggaatacaaaacggtttctttctttgccttaggtgcggtagtgctggcaattaccggcgtagaggcactgtatgcggatatggggcatttcggtaaattccctattcgtctagcttggttcaccgtggtgctgccttcgttggtgctgaactactttggtcagggcgcactgttgctgaaaaatccggaagcgataaaaaaccccttcttcctgctagctcccgattgggcgctgattccattgttggttctggcaacgttagcgacggttattgcctcgcaggccgtgatttctggcgtattctccctgactcgtcaggcggtgcgtttaggctatttaccaccaatgcgcattatccatacttcagaaatggagtctggccagatctatattcccgtaattaactggacgctatatatcgccgtagtattggtgattatcggcttcgaacgttccagtaatctggccgcggcctacggtattgccgttaccggcaccatggtattgaccagtattctgttctgcaccgtggcgctgaaaaactggcactggaatcgggtattcgtagcctgcttattgatgatattactgatcatcgatatcccgatgttctccgccaacgccttgaagctgttctccggcggttggttacctctgacgctgggtctggtgatgttcatcatcatgaccacctggaaaagcgagcgtttcagcttactacgtcggatgcatgagcacggtaattctctggaagcgatgatcgcctcactagagaaatcgccaccggtgcgggtttcaggtacggcggtatatatgtcgcgtgccgtgaatgtgattcctttcgcgctattacataacctcaaacacaataaagtgctgcatgatcgcgtggtattgctgactctgcgcactgaagacgcgccttatgtacacaacgttcgccgtgtgacaattgagcagctctcaccgaccttctggcgtgtggtggccagctacggctggcgagaaacgccgaacgtggaggaaatcttccaccgctgcggtctggaggggctgccttgccagatgatggaaacctccttctttatgtcccacgagtcgttaatattgtcgaaacggccttggtatttgttcctgcgcggtaaactgtttatggctctgagccgcaacgctctgcgcgcgccggatcagttcgaaatcccgcctaatagggtgattgaactgggaactcaggtagaaatctagttactaaggccgtcattccgacggcctttttacttcttgtactgatacgcactgactttttatccgcagattttccctaccacttattttcccgaagtatttagccagtttattcatccttgtttaatagtgcagcgaaacgtttcgatggcgatcacaaattcaccacattaggtttgccttctgctgtcttttttttaaacttatccatcagcgaaacgtttcgctgtcggagcaaaaaatgaaaaaaggcgtattactgaattctgatatttccgcggttatctcccgattaggtcatacggatcaaatcgtcatagcggatgctgggctgccgattccggccagtaccacccgcatcgatttggcgctaacacagggtgtacctggcttcctccaggtgctgtcggtggtgacgcaggaaatgcaggtagaaagcgctattttggcggaagagatcgcgaagaataatccgcagctccatgaagctttgctgacacaacttaaacaacttgagcaacaccagggaaactccattgctttgcactatgtcagccatgaggctttcaaagagcaaacaaaacatagccatgcggtcatccgtagcggggaatgttcaccttttgcgaacgtgattctctgcgctggcgtaactttctgaggcatttatgcaacctttgctgcaattgaaagggattgataaagcctttcccggcgtcaaagcgctctctggcgctgcactcagtgtttaccccggacgggtaatggcgctggtgggtgaaaacggcgcagggaaatcgacgatgatgaaagtgctgacgggcatttataccaaagatgccggtagccagcattttctcggtcaggaagtggtattcaatggtcccaaggcctcgcaggaagcgggtattgggattattcatcaggaacttaacctgattccacagctgaccattgccgagaatatctttcttggtcgtgaattcgttaaccgttttggcggcatcgattggaaaaagatgtatgccgaagcggatcgcctgttatcccgcctgaatattcgctatagcagccatcgtttggtcggtgagctttccatcggcgatcagcaaatggtcgaaattgccaaggtgctgagcttcgaatccaaagtcatcattatggatgagccaacggatgcgctgacagacacagaaaccgcctcgctatttaacgtaatcaacgagttaaaagctgaagggcgcggcattgtctatatctctcaccgtctgaaagagatttttgagatctgcgacgatgtgacggttttccgcgacggccagtttatcggtgaaaagccggtaagcgagctggaagaagatacattgattgaaatgatggttggccggaagctggaagaacaatatccacgcctgaatttgcctttgggcgatgtgcgcttgcaagtgaaggaactttgcggcccaggggtgaacgacgtcagctttacgctgcacgccggtgaaatcctcggtgtggccgggttaatgggcgcagggcgtactgaactgatgaaaatcatttacggcgcgctgccgcgtaaatctggttatgtgatgctggatggtcgtgaagtggtgacccataccccgcaggacggtttggctaacggcattgtttatatttccgaagaccgtaagcgtgatggtttggtgttgggaatgtcggtcaaagaaaatatgtctctgacggcattacgttattttagccgcagcggcggatcgctgaaacatggtgaagaacagcaggccgtggctgactttattcgtttattcaatattaaaacgccatcaatggaacagcctataggtttgttgtccggcggcaatcagcagaaagtggcgatagcccgaggattaatgactcgacctaaagtcttgattctggatgaacctacccgcggtgtagacgtaggggcgaaaaaagagatctatcagttaatcaaccagttcaagcaagaagggctcagcatcattctggtttcttcagaaatgccagaggtgataggcatgagcgacagaattctggtgatgcatgaaggtcatttaagcggtgagttctctattgaacaggccactcaagaagtgttgatggcagccgccgtcggcaagcgtgatttatttatgagtagtagcgcgcaaagcaggagtaatcagatatgagttcccagactatccagaccaaacgctggttcagcaaagagtggctactagaacaaaaatcgctgattgcgctgctggtgctgattgccgtggtttcgtccctcagcccgaatttcttcacgctaaataacctatttaatattctgcaacagacctcggtgaacgccattatggcggtagggatgacgttggttatcctgacgtcaggcatcgatctttccgtgggttccttactggcgctgaccggcgcagtcgcggcatcgattgtcggattggaaatgaacgcgctggtggccgtgggtgccgcgttggcggtaggagcctttgttggcgcctgtacgggcgtcatcgtggcaaaaggcaaggtgcaggcctttatcgccactttggtgatgatgctgctattgcgcggcgtgaccatggtgtataccaacggtagcccggtgaataccggatttaccgatgccgccgacgcctttggctggttcggtattggccgcccgttagggataccaacgcctatctggttgatggctatcgtttttgccggtgcctggtacatgctgcaccatacccgtttaggccgttacatttatgctctgggcggcaacgagtctgccacccgtttgtccggtatcagcgttgataaagttaagattattgtttactcactgtgtggcttattagctgcactggctggcattatcgaagttgcgcgtctatcttcagcccagccaactgccggtaccggctatgaactggatgcgattgctgcggtggtattgggcggcacaagtctggcgggaggcaaaggacgcattgttgggacgctgatcggtgccctgattcttggcttcttgaataacggtttgaatttattgggtgtctcctcctattaccaaatgatcgttaaagcagtagtcatcctgctggcggtattggtagataacaaaaagcagtaggcgacgttgcaacaataacgcctgcaaaattaacgatgctctctccctacaggaactgcgaccatgaaaatgaaaaaactggctactttgatctctgttgttgccctgagcgccacggtgagtgccaatgcgctggcaaaagacacgatcgcgctggtagtttccaccctgaataatccgttctttgtttcaatgaaggatggcgcacaaaaagaagcggacaaactgggctataacctggtggtgctggattcacagaacaacccggcgaaagagttggccaacgtacaggatctgacggttcgtggcaccaagctgttactgattaacccaactgactcagatgcagtgggtaatgcgattaaaatggcaaatcaggccaaaattccggtaatcacgctggaccgtctggcttctaaaggcgaagtcgttagccacgtcgcttccgataaccgctttggcggtaaaatggccggtgacttcatcgccaaaaaactgggtaacgatgccaaagtgattcaactggaaggtatcgccggtgcttccgctgctcgtgaacgtggcgaaggctttaaacaatcgatggaacaacataaattccaactgttagccagccagccagcagattttgaccgcaccaaaggcctgaacgtgatgcagaatctgctgaccgcacatccagcggtacaggctgttttcgctcagaacgatgaaatggcgctgggtgcgctgcgtgcattgcaaactgcaggtaaaaccgatgtattagtggttggttttgacggcactgacgacggcatcaaagcggttgaaggcggcaagttgggtgcaactatcgctcaacgccctgaccaaatcggcgctatcggggttcaaactgcggataaagtgctgaaaggcgaaaaagtacaggccatcatcccggttgatttgaagttagtgaccaaacaataaaagcagagaatttaggtatcacgccgccgcagcaatgcaatgttagcggtggcgttatctacaaaggaatagatgcgatggaaacaggtaagctagtggttcttggcagtatcaatgctgaccatattctgaatattgagcaatttccacgtccgggtgaaacggtgatcgggaagcagtatcacgttgctttcggtgggaaaggtgccaatcaggcggttgccgccggccgcagcggagcggatatcgcatttattgcctgtgtgggtgaggatgatattggtgaacgcgttcgtcaacagttggctaaagaccgtatcgataccacgccggtggaagctatcgcaggcaaaactaccggtgtagcactgattttcgtcaatggagagggggagaacgttatcggcattaatgccggagcaaattctgccgtgacacccgaataccttcaacgttatcagcagcaaattattgatgcgcaagcagtattgatgcagctggaatctccgctggaaaccgtgatagccgctgcgaaactggcgagagaaagccagacgcaggtgattctgaatccagcaccggcgcgcgagctaccggatgagttattacagctggtggatatgattacaccgaatgaaaccgaggccgagcgcctgacaggtattcatatcgaaaatgaggaagacgccaatctggcggctcgggcattacatcagaaaggcattacgacggttattatcaccttgggtagccgcggtgtatggcttagccagcaaggtcagggcaaactgatgccgggttttaaggtgaatgcggtcgatactattgccgccggtgatacttttaacggcgcactgcttacagcgttattggacggtcaggaaatggcatcggcgatacgttttgctcatgcagcggccgcgattgccgtgactcgccctggcgcacaaccctccattccatggcgggccgaaattgatgccttcttgcaaaaccagaggtaattttggcgaccatgaaagatgtcgcccgtttggcgggcgtttctacctcgacggtttctcacgtcatcaacaaagatcgttttgtcagtgaagcggtacgcgacaaagtcgttgccgctattaagcaactcaattatgccccttcggctttggcgcgtagcctcaagcttaatcaaacccgcactattggcatgttggttacggccagcagcaacccgttttatgccgaggtagttcgcggcgtggagcgcagttgctatgagcgcggctacagcctgattttgtgtaataccgaaggcgatatcgatcggatgagccgtagcatggaaaccttgctgcaaaagcgcgttgatggcttgctattaatgtgtaccgaaaatcatcgcccgtctcaggatgttctccgctgttacccttctttacctattgtcatgatggattgggctccttttgaaggtgtgaacgacaccattcaggataactcgctgttaggtggggatatggccacggatttcctgattgccaaaggctataaacgcattgcctgtatcgccggaccacaggataagactccggccagagaacggctggaaggttaccgtcaggcgatgaagcgtgccggcttgccgatcttggctggatatgaaattgccagtgactttgagtttgcgggtggtttggaatcaatgaagcagttattggctttgcccgaagtgccggaagcagtatttactggtaatgatgcgatggcagttggggtttatcaggcgttgcatcaggttggattatccatcccgcaggatatggcggttattggttacgatgatatcgagatcgcccgttatatgacgccgccgcttacgactattcatcagccgaaggatgatttgggtgaattggccatcgatacattaattcatcgtctgaataatccatttgcagaaccgcagattctcacgctcacacctgagctggtggagcgtggttctgttgctcagcgctagactttgcttttccgcgcgctgcggcctttaatcaggttatcgccatctttaggtttgagtagcaagaacactagggatgaaaccaatgtcactgcgcccatggtaataaaggtgtagtggaaatggtcgatgtgattgccaaacggtaattcctcgtagaaacgcagtacggcggcgctgatagcgacgccaaagctgatggaaagctgttgagtgacggccagtacgctattaccggagctggcgttgttatcggtcaggtctgccagcgtaatggtattcatggccgtaaattgggtagacatcgccattcccaaaatgaatagtggcacgatcattagccagacagacatgcccggcgtttgtaatgaaaacaatccaatcagtgtgccaataatcaacgtaatgctcaccagcacctttctatagcccaaccagcgcaaaacctgagtcacggtagattttgccatcattgagccgatagccgtcggcgccatcatgcaaccggcaatgatggccgagtagccaaagccaacttgtagcatcaatggcatcaggaaaggtacacagccagttcccaatctggaagcgatattaccggctatcccgacggagaacgttctggttttgaatagaggtaatccgattaatggatttgggtgtcccttggcgtggaaaatataaccgactagcaggagcaatcccccaagcatcatcgagggagaaagatagcccgacacttccgctttccccatcatctccagactgatagaaatcatgaccaaactaaagccgaacagtaggaagccactaatatcaaaggctcgcttaggcatagtgaaattaggcatgtatttcagcgcataaaaaatgcctaacaggccaatggggatattgataatgaaaatccaatgccaactggcgtaagtcaccagcaggccacccagcaaggggcccataatggggccgactaaaccgggaatggttacgaaatttagaaccggcagtaattcactgcgcggataagcgcgtaataatgccagtcgcgcgactggcatcatcatggcgccgccaatgccttggataacccgcgaggcgaccagaaatgagagggaacctgataacgcacataataaagagccaaaggtaaacagcgagacggcaatgataaaaattcgccgggtgccgtagcgatcggctaaccagccgctgactgggatcagcatagcgacggttagcgtgtagctgataatggcagactgcatagttaacggcgagcgattgaggctttcggctatcgcgggaagggctgtgtttaatattgttgcgtccagcgcctgcataaagaaagccatggcggcaatccagggtaagccggccatgctacgagcagatttaatcattctatttcctgatggaattcgttattaacaatcctctcttctatatatagataacatgtgattacacactccgtcagtttttgtcttgtaataatacctgacaggcaatgcaggcaccctgactgtcgctggcaaggatggtatcaacgatagattggtggtgttgcagctttatcacttcatcgccggtaatagcacggaagtagctgtgatataccgaactgaacaaattggcgaacgaagtcaggaagggattaccactggcttcgtagatcagttgatgaaattgggtatccacctgaatccagcgttcacgatcaaattcacggtgcagcgcctgcatttctgccatcaatatagccaattgctgtttttgcgcaggattagcgttaaccgcggccaaagcgcaggcctgtggctctaacgcggttcgtaccaaaataaagtgctgcatcacctgatcgaagttttcacgggtcatccaccaggtgagtaactcctgatcgagaaaattccagttggactgcggcataatgcgcgtaccaatccgtggccgtggcaacaacatccctttcgccgctaacattttaaccgcttcacgtactgcagtgcggcttacgccgaactgttcgcctagttctatctctccgggcagtatagaaccggctatatattcgcccgccaggatacgctggccaatcttttcagctaataaataggaaaggttgcgttgggcggcttgttgttgggcgttaaattgcatggtgatttgtcctggctaacttcttatccttctattttactctactgtttcactctggtattggctgtttaactgaaaagtagtagaaaagttatccatttccgcactttttgatgaaaaaaaagccggttggaaaattatttgaaattaggggttgcagcctgtcaggaactccctataatgcgcctccactgaccgggaacaacgaaacaaacttcgccgggtcaggaagtgttaagcaggcggaaacgccggttcttaaaacgaaagttgaaaagaaaagcttgacacttcagcgggaaagcgtattatctgcctcccgcgttaccgtaagattcgccgcaagcgaacgggtaacgaacgctctttaacaatttatcagacaatctgtgtgggcactcgcaagacgatatcaaagcctgtttcggcaggcagaagaaatatcaagtcttgaagagtgaccaaagcagtaaacatttgaacttcggttcgaatgcatatttgcagaaagtaatctttgagcatcgctacttcggtagcaaatcaaacaaatcttaaattgaagagtttgatcatggctcagattgaacgctggcggcaggcctaacacatgcaagtcgagcggcagcggaaagtagcttgctactttgccggcgagcggcggacgggtgagtaatgtctgggaaactgcctgatggagggggataactactggaaacggtagctaataccgcataacctcgcaagagcaaagtgggggaccttagggcctcacgccatcggatgtgcccagatgggattagctagtaggtggggtaatggctcacctaggcgacgatccctagctggtctgagaggatgaccagccacactggaactgagacacggtccagactcctacgggaggcagcagtggggaatattgcacaatgggcgcaagcctgatgcagccatgccgcgtgtgtgaagaaggccttcgggttgtaaagcactttcagcgaggaggaaggcatttcacctaatacgtgaagtgattgacgttactcgcagaagaagcaccggctaactccgtgccagcagccgcggtaatacggagggtgcaagcgttaatcggaattactgggcgtaaagcgcacgcaggcggtttgttaagtcagatgtgaaatccccgagcttaacttgggaactgcatttgaaactggcaagctagagtcttgtagaggggggtagaattccaggtgtagcggtgaaatgcgtagagatctggaggaataccggtggcgaaggcggccccctggacaaagactgacgctcaggtgcgaaagcgtggggagcaaacaggattagataccctggtagtccacgctgtaaacgatgtcgacttggaggttgtgcccttgaggcgtggcttccggagctaacgcgttaagtcgaccgcctggggagtacggccgcaaggttaaaactcaaatgaattgacgggggcccgcacaagcggtggagcatgtggtttaattcgatgcaacgcgaagaaccttacctactcttgacatccacagaacgtagcagagatgcttcggtgccttcgggaactgtgagacaggtgctgcatggctgtcgtcagctcgtgttgtgaaatgttgggttaagtcccgcaacgagcgcaacccttatcctttgttgccagcacgtcatggtgggaactcaagggagactgccggtgataaaccggaggaaggtggggatgacgtcaagtcatcatggcccttacgagtagggctacacacgtgctacaatggcagatacaaagtgaagcgaactcgcgagagcaagcggaccacataaagtctgtcgtagtccggattggagtctgcaactcgactccatgaagtcggaatcgctagtaatcgtagatcagaatgctacggtgaatacgttcccgggccttgtacacaccgcccgtcacaccatgggagtgggttgcaaaagaagtaggtagcttaaccttcgggagggcgcttaccactttgtgattcatgactggggtgaagtcgtaacaaggtaaccgtaggggaacctgcggttggatcacctccttacctaatgatacgcattgcgcagtgtccacacagattgtctgataatagtaatgagcaagagcacctgttgatgtcgtgagtttcgactcatgatgacacgagaaacgattaagtttttgatttagtcggaatttcctgtgtccccatcgtctagaggcctaggacaccgccctttcacggcggtaacaggggttcgaatccccttggggacgccatccgataatgagtgaaagacattatcaactgaatatcttaaagatgactttaacgagtcgtgtttaagatattgctctttaacaatctggaacaagctgaaaattgaaacactgcagctaaaacttgtctctccgtagatttaccgagacaaggagtcatctgcaggtagagtctctcaataatcgcagcacgatgatgtcgaaagacaccttcgggttgtgaggttaagcgactaagcgtacacggtggatgcctaggcagtcagaggcgatgaagggcgtgctaatctgcgaaaagcgtcggtaagctgatatgaagcgttacaaccgacgatacccgaatggggaaacccagtgcaattcgttgcactatcgttagatgaatacatagtctaacgaggcgaaccgggggaactgaaacatctaagtaccccgaggaaaagaaatcaaccgagattcccctagtagcggcgagcgaacggggaggagcccagagtctgaatcagtttgtgtgttagtggaagcgtctggaaagtcgcacggtacagggtgatagtcccgtacacaaaaatgcacatgctgtgaactcgatgagtagggcgggacacgtgacatcctgtctgaatatggggggaccatcctccaaggctaaatactcctgactgaccgatagtgaaccagtaccgtgagggaaaggcgaaaagaaccccggcgaggggagcgaaatagaacctgaaaccgtgtacgtacaagcagtgggagcaccttcgtggtgtgactgcgtaccttttgtataatgggtcagcgacttatattttgcagcaaggttaaccgtataggggagccgtagggaaaccgagtcttaactgggcgtctagttgcaaggtatagacccgaaacccggtgatctagccatgggcaggttgaaggttgggtaacactaactggaggaccgaaccgactaatgttgaaaaattagcggatgacttgtggctgggggtgaaaggccaatcaaaccgggagatagctggttctccccgaaagctatttaggtagcgcctcgtgaactcatcttcgggggtagagcactgtttcggctaggggtccatcccggattaccaaaccgatgcaaactccgaataccgaagaatgttatcacgggagacacacggcgggtgctaacgtccgtcgtgaagagggaaacaacccagaccgccagctaaggtcccaaagtcatggttaagtgggaaacgatgtgggaaggcatagacagccaggatgttggcttagaagcagccatcatttaaagaaagcgtaatagctcactggtcgagtcggcctgcgcggaagatgtaacggggctaaaccatgcaccgaagctgcggcagcgacacttaggtgttgttgggtaggggagcgttctgtaagccgttgaaggtagtctgtgaggactgctggaggtatcagaagtgcgaatgctgacataagtaacgataatgcgggtgaaaaacccgcacgccggaagaccaagggttcctgtccaacgttaatcggggcagggtgagtcgacccctaaggcgaggctgaaaagcgtagtcgatgggaaacaggttaatattcctgtacttggtgttactgcgaaggggggacggagaaggctaggctagccgggcgacggttgtcccggtttaagcgtgtaggggggtgttcctggtaaatccggaaaaccatcaaccctgaggcgtgatgacgatgcaccacggtgcagaagtagttgatgccaagcttccaggaaaagcctctaagcatcaggtaacattgaatcgtaccccaaaccgacacaggtggtcaggtagagaatactcaggcgcttgagagaactcgggtgaaggaactaggcaaaatggtgccgtaacttcgggagaaggcacgctggcgctaggtgaagagacttgctctcggagctgaagccagtcgcagataccagctggctgcaactgtttaataaaaacacagcactgtgcaaacacgaaagtggacgtatacggtgtgacgcctgcccggtgctggaaggttaattgatggggtcagccgcaaggcgaagctcttgatcgaagccccagtaaacggcggccgtaactataacggtcctaaggtagcgaaattccttgtcgggtaagttccgacctgcacgaatggcgtaatgatggccaggctgtctccacccgagactcagtgaaattgaactcgctgtgaagatgcagtgtacccgcggcaagacggaaagaccccgtgaacctttactatagcttgacactgaacattgagccttgatgtgtaggataggtgggaggcatcgaagcgtggacgccagtctgcgtggagccaaccttgaaataccaccctttaatgtttgatgttctaactcggccccataatctggggtgaggacagtgtctggtgggtagtttgactggggcggtctcctcccaaagagtaacggaggagcacgaaggttagctaatcacggtcggacatcgtgaggttagtgcaaaggcataagctagcttgactgcgagagtgacggctcgagcaggtacgaaagtaggtcttagtgatccggtggttctgaatggaagggccatcgctcaacggataaaaggtactccggggataacaggctgataccgcccaagagttcatatcgacggcggtgtttggcacctcgatgtcggctcatcacatcctggggctgaagtaggtcccaagggtatggctgttcgccatttaaagtggtacgcgagctgggtttagaacgtcgtgagacagttcggtccctatctgccgtgggcgttggaagattgagaggggctgctcctagtacgagaggaccggagtggacgcatcactggtgttcgggttgtcatgccaatggcattgcccggtagctaaatgcggaaaagataagcgctgaaagcatctaagcgcgaaacttgcctcaagatgagtcttccctggggctttaagccccctgaaggaacgttaaagactatgacgttgataggctgggtgtgtaagtgcagcgatgcattgagctaaccagtactaatgatccgtgaggcttaaccttacaacaccgaaggtgttttagagagcgttttgattttcagcattgttaacagattggattgactggctgtgtgatgtaaatcacgtggcgggttgattaaaacagaatttgcctggcggcaatagcgcggtggtcccacctgatcccatgccgaactcagaagtgaaacgccgtagcgccgatggtagtgtggggtctccccatgcgagagtaggacactgccaggcatcaaatcaagccaagaccccatgccaaaagcgtggggtttttgctatggaaaaaagacagacgcgaggcggataaaagtcattgccgccctcgaaccgagcctcctgcgattgcggggggctttttgcgtttaagggcatgggaacccccgggaatgccgggcgttgaaggcgtatatggcgattttcattccatagggggcggcttatccggtaaattgcgccgccgttgacgttttcaggcagtaaattcgcagcattttcaggcagatacagtcactcaccgggcttatattttattaaaaagccatgtaaccaacgaaccaggtcggttttatcggaaactcatcccccattaacgggtattcacactcggcggtagctcaagagccaggcttgcatccggtggggcgtaaggggataaaacgtgtcgccagtcgggatgctgaggcctctgatacactaccggcctcactgcgaagagtaacagacagaagatttttaactgctggttaaaactctggcggtgactgacgagtcaggctacataccaaataaccttttttatcatctagattgttgtgttgttaacttgcaatgagggtgattttgccgaagttttaggcaatgtgatgcaaccctaccccaaattagcccagttatcagggtgttataagatgctattaacggtgtgaataagtggctgtttgaaaagtggttttagcggcaagagtgtgggctgtcaggcgcaagcgtcctgttgaaaagtcagctaagtcatcatcttcgagccaacctaatggcgtgaccagctttatactatcagcagcagttaagactgacttttcagccaggaacagatgaaatcagcaatatgatagggttgattaatatccaattgcggtaaatctgtaggtgccggttcatcgcttgctagcgcaataacatgcttatcgattactccggtaaaaggttttcctacagccgctcgatatagggcgatcttattgataggctcatgtctgaacccctcgaccaatacgagatcgatactgtttgcatccannnnnnnnnnnnnnnnnnnnnnnnnnnnnnnnnnnnnnnnnnnnnnnnnnnnnnnnnnnnnnnnnnnnnnnnnnnnnnnnnnnnnnnnnnnnnnnnnnnnnnnnnnnnnnnnnnnnnnnnnnnnnnnnnnnnnnnnnnnnnnnnnnnnnnnnnnnnnnnnnnnnnnnnnnnnnnnnnnnnnnnnnnnnnnnnnnnnnnnnnncaccgcaatgataaattggtgtaagttcgctgagattgtccgattgtaaaaatggcccgattccgcaaagaatcaggccatttttttaccccaaaatcaggctaatgaatcactacaggctgcccggcgtgcgggtattattgcgagttggcgtgttcacgctgcggccagcgcgccccagcgtttccattcgaacctggaacggtgggaacggcagaacaataccatgctcgcggaagccttccagaatcagttgatgtatttcgtggcgcattggcaagcgatgaagcatttcggcggcatagatacgcaactcgaaaatctgaatgccttgctgtagatccatcaggaatgcttctggcccagggttatccaagaccatggaacaacgtctggcggcggtaagcagcagttcggtcacttcttcgctattggcttcggccggagccggtactgttaagaccacgcgagtaataggatcggacagtgaccagttaatgaactgctcggtgataaaggccttattcggcacgataatctctttgcgatcccagtcggaaatggtggtggcgcgggtattgattttggttacgctaccggttaaatcgcgaatagttacggtatcgccaatacgaatcggtttttcaaatagaatgatcagcccagagacgaagttggcaaaaatttcctgtaagccaaaacctaaccctaaaccgagagcggcgaccagccattgaaatttcgcccattcaatccccagtagtgaaaagcctaataggccaccgaacaaaatcaccagatatttggttattgtcgaaatggcataaccggtgccgggcgtcaggtccagatgctgtaatagcgccagttccagcagggcaggcaggttccgcactaactgagtcgtcacgattatgaccagaatggcgatgatcagcgatcccatagtgatcggctggatggattcgacgccgttgatagtcgaagaaacatcccataggcgaatattttccaggaaaccaaaggctgaatggatctctgaccacaggaagatcactgaaaccagcgcgatcatagtgagtatggaacgaaccagacgcagcgattgagcgctgatcacgtccagatcaataaccggctcatcaacatcgaccgacccctcggaactattcgtatgcggcgtatcttcttcacctctggcacgctgcgccaggatatcggcccgacgctgtttagcacggtcaaaggcaatacggcggcgctgaatcagcatccagcggcgaataatatggtaaatcaccagcaggaagaaccagatggcgacggaggtttccagacgagccagcagcgcctgagacgtggtgagataccccatcagcgaggccagcgcggcaatcagcggagcggaaagcagcagcccccacagcgcctgattgatcttattctctcccgaaccttttttatccagatacagcggaataccggcacgtttcagactgttggtgaccagacttagtgcgatacacaacaggacaaagcacagtcggcctaatgtgccggcgaattcgcggtcgttataattctcgaaggttatcaacgccatcatcaacggaataatcagccataccgacatacggtaaaagcgcatcgcacgcgcgacctgatctggcgcccagcggaaatgggtgataaacaggccgtgaggatgagcaaaagcggcgctgatcataaacacccacagtaccggaaccgtggcggtcactgcgttgccaatggcaatcgccatcgggtaggaccacgcgttttgcaacccgtaacccagcgccgcccagagcacaggaagcggcaaggccaccagaatcgaccagaaaacggtgcgcagcgttaatgaaaactgatcttgcgtaactttgccgacccggctgctggctcgctccaaaaacgcatgataatggcgacgggagctgacgctaaagctgacaaacagcagcgcggcgataatcggaatcagcgtttcctgactggtcatcatcatcacaaaggcaccgctgagctgggataaggtatccagcgaaagcaggcgcgtcaggtcacgagcgacatcgatcggataagacaaggaaattgggctaacgtccgcaacccaaaacagatagcggtgggtcgcctcgcggatttcattcagggcatcaaccaattgactattggcgactttcagcttggtcagttcgagaatctgcgtgtcatagccagaaagcagtgaatttagcagttctcgctgggtgcgtagctgagcgtccataatgcgttgttgctgaaccgtcagcggcgtaccgtcgtcctgcgtcgctttggttcctttttgctgctgctccagcatcccttcataggtcagacgctgaactcgaagctgagccatatctctatctaactgttgagattttggcatttcaggcaagcgggctacgtgcgctcgtagggtttcccccagtgcagtagaaatacccagccattgcgcctgttcgcgaatggtgctgagagtctgccgaactcgcagagtgtctgccgccgcctgacgttgttgagaggaaatcaggtccatgcgctgagcctgactgttcagcgcgcgggataaatctcggttggtttctagctgctggctgatggaggccggcagatcgccaccttgttccgccagtaattcggtgcgttccagcgctctttccgcttcaagctggcgctgattattcaaattgttacgcaatgtctgcaataaggtgtctgtccgctcatggttctttttatatacttcggcgcgcatgcgggacaattcttgccggttattggcagaaagctgagaaagctccagctcattcactttggctttacgagccgtaacttccgcctgtaatagtgcaaattgcgcctgcgccagcggagaggttggtgagttttgagattgcagacgcgtcgtggcttcacctaataggcggcgggcatctgattgttgttgaggaagttgccccagagagtcgctaatttcccgcaaacgatcctgttcttgctgcatttgacgggaaagttccagcagttggctgctggtttgcaggatttgctgctccatctcattggtcgataaattggttggcaccggcagcggtttttcgctatccggcgtcaactgttgacgtaactctctggttaatttggggaaatcatcaatgactttctggtattgctgtgcccgttcgtcggactctttcgcatcattaagccagttgatagcaccttgcagcgcctgaacaatttccgcctggttggcggcgcctttattcgcctcagcctgcttcagctcttgtctgagctgagcctcattaggctgagttgccgcataaagcggcagagagagaaaaataccaagcaggaatgtggttatcaggcgcacgttatgcttccttaaatcaagttacgccataaagcgttaggttagcacggaggcgtcggtggaacggcttctgccagtagctcacccatacgggtgatggagccactgtttagctgcggagccagatacactttgcctgatgcaaataggttaataaccgttgagcccagcttgaagcgacccatttcctgccctttctccaatgcaatcgccccttcttcaccggcctgcgggtaggtccagcggcggataaccccttcgcgggttgtattggttgttcctgcccaaacggtttcaatgctaccgacaatggtggcaccgaccagaatctgcgccatcgggccaaaagcggtatcaaagatacagatcacgcgttcgttacgggcaaacaggttagggacattggctgcggtcagcggattgacggagaataaatccccaggtacatagatcatttcacgtagtacgccgtcacaaggcatatgcactcggtgataatcgcgcggcgctaaatacgtggtgataaaggtgccgttcttgaattcttcagccaacaggtagttaccggccagtaaagcttccagcgtgtaattgtggccttttgcctgcaagatttggtcttcgcggatagcgccaagctgactgacggcgccgtcagcaggctgtgccagcgcattgtcttccgccaccacagggcgtgcatccgggcgtaacggacgaacgaaaaattcgttgaaagtggcataagcggtgaattctgggttctgcgcttctttcatatctacgttatagaaacgggcaaagcctttaataaccagttgagtcaaccagccgccttttttgtctgcaccccagccagccaggcgcgtaagtccttgcttcggaagtaaatattgcagtctgattttgatgctatccagcacgagaacctcttggattaggcattagccattagataaaaggggcgcattgtaacgttcggcgcccgcaatgtcagttattcagaatctgaaagcggtttgcgtggtttgacttgttccatgctttccagaattcgatggtagttatcgaaacgctcttcggcaatatcaccgcgctccaccgcttcgcgcagggcgcagccgggatcggtggtatggctgcaatctcggaatttgcaatgaccaatgtagttgcggaattcgacaaacccttgcgtgatttgttccggtgctaaatgccacaggccaaattcgcgcactccaggtgaatcgatcacatcgccgccgtgctggaaatgatacaagcgcgcggcggtggtggtgtgttgtcctaaacctgagttatcggaaactgcgttgaccaaaatttgcgtatcgcttggtggtaacagggcgttcagcaggctggatttacccacgccggattggccggcgaaaatgctgatacggccagccagcgcctgttcaaaggctgccatcccttcgcgagtctggctagacacttccagtaccttgtaatcgatacggcgatagatatccatcatgccatcgacgaatttgcggccttcggcatccaacagatcgactttattcagtacgatcagcggttctacgtccagcgtttcacaggccaccagatagcgatcgataatattgagtgagagttccggcaaaatggccgagacgatcacgatttgatcgatgttagcggcgatcggcttcacgccgtcgtaaatatcaggacgggttaaaaccgaagtacgttcatgtaccgcttcaacaatacctttaactcgaacaccttcctgctgaatacccggtcgccaaacgacacggtcaccggttaccaaagaggtaatggtgcgacggatattacaacggtgttgggtgccatcagtggcttcaacgtcggcgtgctgaccgaaacggctgattacgataccttcttgcgcatcgccaagctgagagtcatctaactcaggttttctatcagtgcgtagccggcgctgatggttagcctgcacgcggcgttgttgacctttggacagtttattcttgctcactgcgcctcacttgaatctgcatttatcgctcgttgcgactaaaagaactatgatacacataattttatcatttaaccgtttgttcggttgatccccccgatgaataggcaggaaatatcatggcaggaaatgaaaataatctgatctggattgatctggaaatgaccggtctcgatccagagcgggatcggattattgagatcgcaacgttggtaacggatgccaatcttaatattctggcagaaggcccggttttggcggtgcatcagtctgatgagcaactggcgctaatggatgagtggaatgtgcgtactcataccggtagtggtctggttgagcgggtaaaagccagcccattcaacgaccatgatgcagaaatgcagaccattgctttcctcgaacaatgggtgccggccggcaaatcgcctatctgcggtaacagcgtgggtcaggatcgccgcttcctgttccgctatatgcctgcgctggaagcttatttccactatcgctatctggacgtcagcacattgaaagagctggctcgccgttggaaaccggaaatcctgccgggctttaaaaagcaaaatacgcaccaggcgctggacgatattcgtgaatctgtggcggaactggcttattaccgcgaacattttatccagctttagtctttaatagataaaatctggtttaaacacggcagaatcttgttctcagtactatgattctgtcgtgcaaatcacgggttttaagcgcttagccgatttattcaacacccgtcgctggcaaaaagtacatattgttgatttaatcgacacttgaacgaaaaaatgatttttttgctttcaggggcttgcagcaaaacggaattctcgtataatgcgcaccccgtaccgatgaagattttcgccagttagcgagatcgaatttagtacgtagagcgggaatagctcagttggtagagcacgaccttgccaaggtcggggtcgcgagttcgagtctcgtttcccgctccaaatttttcaagtagtggcagaagctaacgatgtcggcgaaccattcgctaatatctgtgatgcgggaatagctcagttggtagagcacgaccttgccaaggtcggggtcgcgagttcgagtctcgtttcccgctccaatcttcagccatgaataccaaatgccgtcaaacagacagcagggtgcatcagcatctcaatgcgggaatagctcagttggtagagcacgaccttgccaaggtcggggtcgcgagttcgagtctcgtttcccgctccaattttatcttcatctccaaaataattatccacagacagttcgcgctttttgtcgtgcctttcacagaatgtattaacttcttcaacagacttatccacagattctgtattttttatatactgatgctaattaaaccaatggctattgcctaaatttaactatttgttttaattgtttatttatttatgggaaaacgttatggcgatctcttgcgctttttttcccacttgattggcaaggcatttttatttttatgcacagggcgcttgacaggtttattacggaaaaacccgcgattgaaaagttatcatgcgtctcgcggcagccctttctcaatggctcgaaccagcctctttttctgcgatgactgcacttcaacactttgttctgcccgccgcgccaactgccgctcgatagcccagacgatatgctcatccaacatagggtcgatgcctttgcgactttccagcgccagcacaatttcatcctgataggcggcatttcccaaagccaccgagatattacgtagccagcgcagatgcccaatacggcggatcgcggaaccttcggtgactcgtagaaacttttcttcattccaggcgaacagatccagcagctttggcgtatgtaataccgcacgcgggctgaaatcttcctcctctgttagttgagagaagcggttccacgggcaaatcagttggcaatcatcacagccataaatacgatttcccattaacggtctaaattcttcgggaatagcgccttccaactcaatggtgagataggaaatacagcggcgagcatccacggtgtaaggcgcgacaatggccccggttggacaggtcgtcatgcaagccacgcagcggccacactgttcctcttgcggttgatcgattggcaacggcaaatcaatcagtaattccccaaggaagaaccaggagccagactcgcgattaagaataagtgagtgcttgccaacccagccaatacccgctttggcagcgagtgaacgttccattatcggagctgagtcgacaaacggacgaaaattgacgccgttttcactcgattgctgtgcgcaatactcctgaatctgatcgcccaatttctttaaccgttgccgcaatagcttgtgatagtcgcgtcccaaggcatagcggctgacatagcccaattctggattgctcaaagtgctggcaaaggcggctttggctggcaggtagttcatgcgcacgctgataacccgcagcgtaccgggcagcagttcatgggggcgcgcccgcaacataccgtggcgcgccatccacgccatttcaccgtggtattgcttgtctaaccacgcctgcaaacgaggttcttccgcagaaagatcggtatcgcagatgccaacctgctggaaacctagcgattgcccccattgcttgatatgttgggctaattgattcagatcgagggggtgtgtcatgacggaccatagtaagaaacaaaacggcctaagtttaccacactctgttttttctgcggactgggtcaggcaacatgaaagcgttgctgctgccgctttgtcactttctctgtttgaactgatggttagagccggtgaagccgcttttgctctggctcgccaatattatcctgcgagccgacactggttgattctgtgcggtcatggcaataacggcggggatggatatatcctggctgcccgcgctcaagcggcgggtttgaaagtgacattaattgcctgtgagggcaatcgtccattgcctgccgaagctgctctggcgcgtgagcagtggttatcggcgggggggaatatttttcctcaggatagtctttggccgcaggatattgatttaattatcgatgggctgctgggcaccggcttacgtgccgcgccacgaggcagttacgctactttaattgaaatggcgaatagatatcgggcgcctaaactcgcgctggatattccttctggcttaggggcggaaaccggcgctgctcctggcgtagtgattcgagccgagcatacgctgacgtttgtggcgctaaaaccagggttattgaccgggcaggcgcgtgattgggtcggtcagttgcattgcgacgatctgggtttgtccccatggcttgatcagcaaatgccgcacattgagagaattacctctgataacctcagcaaatggttgaaaccgaggcgaccttgttcttacaaaggtgagcaaggtcgtctattgttggtagggggtgataaaggtttggggggcgcaatacggatggcgggagaatccgcactacgcagcggtgctggattggtgcgagtgcttactaacatcgatcatgttgctcctctactcactgctcgtcctgaacttatggtacaggcactcagcgatgatttattgattgaggctatcgattgggcagacactttggttattggaccggggctggggcaaggagattggggcaggaatgctctgaaattactgcaacagagtgataaacctgcgttatgggacgcagatgcgctcaacttgctggtattaaatccgctgaggcgtcagaatcgagtgttgacccctcatcccggtgaagcggctcgtttgctcggttgtaccgtcgctgaaattgagagtgatcgcttactttcagttcgtcgactggtagagacatacggcggcgtagtggtactaaaaggtgccggtacgttgatagccagcgagcagggcgaaatggcgatagccgatgtggggaatgcgggcatggcgaccggcggtatgggcgatattttgtccggtatcatcggcggtttgatagcgcaaaagctggtgctgtatgatgcggcttgcgcaggttgtgtggtccacggcgcggcagccgatcaactggctgaacaacaaggcacccggggtttactggcgacagatttattgccggttattccgaactacgttaatcctgagttagcaaaatagatatcaagaatgaaagaactcgttttacctttgcctgatgaggcagcaaccgttgcattgggggctcgtttggcgcaagccttcgaaggtgccagcgttatttatctgttcggcgatttaggtgccggaaaaactacattcagccgcggcttcctgcaagctctgggacatcaaggccacgtaaaaagccctacctataccttggtggagccttacgcactgacgcctcggccggtttatcatttcgatctttaccgattggcggatccggaagagcttgaatttatgggaattcgcgactatttcgatcgacaggctatttgcctggtggaatggccgcagcagggcgagggcttcttgcctaagcctgatatcgaattacatttggactatcagccgcaggggcgtgaagctcggctggtagcgctgtctgattctggtgcggatgttctgcaccgcttagccgctgcgcaaggataaactgtcgatgatgcttagctggagaggctatttagccaccgcattgttggttgtttctagcgtattggccgctccggcggcatgggcgatgaagttaaccgatatcaaagttaccaacggttccggcgaaagtcagataaccctgagcttcgacggcaaaccgatttatgccttcttcccgctgagcgggccggagcgcgttgtgctggatattcgtcagagcggtaatctttccggtttaccgctggaattcagtgggcagaatctgttgaaaagaattcgctccagccagccgaaagacccgcaaagcacccgattggtgtttgaactgacgcaaaaagccaaaacacgcgcagtgacgcagcaagtgggcaatcaatataacgtggtgttcaccctgacagccgctggtacgccagtacgtcaaactcaaacggtgaccacggcgacggcgacgcgacaggcaaccaaggccaccgccggcagtaatccgttcaataataagccaacggtagtgaccagcagcccgaccatcaccacctcaaccacgcgtccggttaaaaccagcgcgccagccagtagcgatcgtgtggtggtggctatcgatgctggtcacggcggtcaggatcctggcgctattgggcaaaatggtctgaaagagaaaaacgtgaccctctccattgcccgtaagctggagacattactcaataatgacccgatgtttaaaccggtgttgacgcgcaacggcgactattttatctcggtgatggggcgttcagacgtggcgcgtaagcaggctgccaacgtgctggtttccattcatgccgatgcggcaccgaatcgcagcgccaacggtgcttctgtctgggtactgtctaaccgtcgcgcgaacagtgaaatgggcaactggctggagcagcatgagaagcaatctgagctgctgggcggagcgggtgacgtactcgccaacacttcagccgatccttatctcagtcaggcggtgctggatttacaatttggtcactcccagcgggtgggttacgacgtagcggtaaaagtgctacatgagcttcaagccattggttctattcataaacgtaggccggaacacgccagtcttggcgtgttgcgttcaccggacattccctctttattagtggaaaccggctttatcagtaatggtacggaggagcggctgctcggcagcagtgcgtatcaggataaaattgcccaagcgatttacaaaggcttgcgcagttatttcctgtcgcatccgctacaagccgacccaaaggtcgaaaaccgtccgctgggcgcaacagcggcggttgaaaggtcagcgcgtcaaagtggtgttaatcagcctggcccggtagtcagtgcggtcagcagtggggggaaagccaccattagcggtaaatcgctgattcacatggtaaaacggggtgaaactctatccggcattgccagccagtacggtgtcagtatggcggcgatgcggcagaataatacgctgaagaaagacgtggtatgggttgggcagcgcctgcgaattcccgcatctggcagcgcggtagctagcgtcgccaaggtgcctgcggtgaagaaaatcagcccggccaaaccgatcaagcatcaggttaaacgcggggatactttatccgctattgcggcgaaatatggtgtatctcaaagtgagattcaacgcgtgaataagctgaagtctggttcggtacaactcggccaaacgctcaccattccacagtcttaaccgaagggatttgttatgccgattcagatattaccgccacaactcgccaaccaaattgccgccggtgaagtggtagagcggcctgcgtcggtagtaaaggagttggtggaaaacagtctggatgctggtgccacgcgaatcgatattgatattgagaaaggtggcgcaaaattaatccgcatccgtgataacggctgtgggatagctaaagacgacttatcgctggcgttagcgcgccatgcaaccagtaaaatcagttcgttggaagatctggaggccattctcagcatgggctttcgcggtgaggcgttggccagtattagctcggtttcccgtttgatgctgacctcgcgtaccgccgaacagaacgaagcctggcaggcttacgccgaagggcgggatatggcggtgaccatcaaacccgccgcccatccggtaggcagtacgctggaagtgctggatttgttttataacacgccagcgcggcgtaaatttatgcgcacggaaaaaaccgaattcggccatattgatgaagtggtacgccgcatcgcgttggcgcgcttcgacgtggcgattcacctcactcacaacggcaagctggttcgccaatatcgagcggccccagatccttcgcagcatgaacgtcgtttggccagtatttgcggcccggccttcctgcaacatgcgctggcgatttcatggcagcacggtgatttgaatattcgtggctgggtggccgaccccagcgctgcccgaacgcctagcgagatgcaatattgctatgtcaataatcgcatgatgcgcgatcggctgattaatcacgctatccgtcaggcttatcaggatctgctaaaagacgatcagcagcccgcttatgtgttgtatctggatattgatcctcatcaggtggatgtgaatgttcatccggccaagcatgaagttcgcttccatcaggcacgtttggtccatgattttatctatcaggcggtgaccagcgttttacagcaaagcgcagaaccagcgctgattgtctccgaagatggcgaaattgaagccccgcgctggcagccggagaatcgggtggccgctggtggaaataaatacgctcagccacagccggaaaaaacagccattcagcagcaatacgtggctccacgggttgccaatacgggttctcatacttctgcacgtgagcctcgagcgccagcctatacgccgccagcgccttatcaaaaacagcagggtgaactgtatcgcgaattgctgaaaccggctcctgcgacggataagttgccagaacaacagcctgcggcagtgataaaaagcagaaaggatgaagaaccgctgcgcagcggacaatacagctttggccgggtattgacggtgctgccaccctgctacgcggtgatagaatatggtcagggcttggcattgctttctctaacggttgccgaacgctggctgaaacaggcgcagcttaatccgccagaggaagggttgcgtccgcagccgttgttgattccgcttaaactgactttggataaaaacgaagccacggcctgccagcatcaccagaaattattgattaccatgggaatcgaactggcgattgaacacggacgagcgacgctacgtgcagtatctttaccattacgccaacaaaatttacaaaaactgataccggaactgttaggctatctgtcgcaacataaggagatgtcgccggaggtacttgccacctggattgcccgccgccttggcagtgagcatgaggtctggaatgtatcccaagcgatacaattattgacggatgtcgaacgtctttgtccgcagctggtgcaatcaccccctgccgggcttttacaacctattgatatacaggccgcattggcaactttaacccatgagtcatactgagaatttgaaccggcccccagctatattcgtgatggggccgaccgcttccggcaaaacggcgctttctattgcgctgcgtcaacatttgcctgtggagcttgtcagcgtggattccgcgctaatttatcgcggtatggatatcggtaccgccaagcccagcgcagaagagctggcgctggctccccaccgattaatcgatattcgcgatccggctgaatcctactcggccgctgatttccgtaaagatgctctgaaagaaatggctgaaattaccgccgccgggcgtattccgctgctggtggggggcacgatgttgtacttcaaggcgctgttagagggactgtctccgttgccttctgccgatccagaggtgcgccagcgcattgaggcacaagccgctgaacgaggttgggaagctctgcatcagcaactgactgaaatcgatccggtttctgccgtgcggattcatcccaatgatccccagagactttctagagcactggaagttttttttatttcgggtaaaactttaacggaactgactaaaatttcgggtgaaaccttaccttatcaggttcaccaatttgcgattgcgcctgctagccgcgagttattgcaccagcgtattgaattacgttttcgtcagatgctggatgcaggatttgaaaccgaggctcgggcgctttttaaccgtggagatttgcatacggacttgcctgccattcgctgtgttggttatcgccagatgtggtcttatctcgctggtgagattgattatgacgaaatggttttccgcggaatttgtgcgacgcgtcagttggcaaagcgacaaatgacctggctacgaggttgggaatctgttcattggctcgacagtgataagccggaacaggctttagactctgtaatacaggttgttagtgcataggttgaatgattgtgtacaattgattagtactcagcgcgcagattttttttacgcagtttattttcgagccgataggttcttagttaaaaacaacaagcaaataaggaaaatatagaatggctaaggggcaatctttgcaagatccgttcctgaacgcattgcgtcgtgaacgggttccggtttctatttatttagtgaatggcattaaactgcagggccaagttgagtctttcgatcagtttgtcattctgttgaaaaacacagttagccagatggtatataagcacgctatctctactgttgtcccgtctcgcccggtatcgcatcacagcaataatccgagtggcggcaccaataattatcatggtagtaatccgtctgcgccgcaacaacagcagcaggatagcgatgacgctgaataaagcgtattgctggtcaaccatgacggagagcataagcaacattgattgtcttatgttctccgcactagcggtttttacccgtttgagaggttgcacgcttgtttgaccgttatgaagccggtgagcaggccgtactggttcatatctatttctcgcaagacaaagacacagaaaatctcagcgaattcgaatcgttggtatcttctgctggcgtagaggcactgcaaattgtgacgggcagtcgcaaagcgcctcatcccaaatactttgtcggtgaaggaaaggccgaagaaattgcagatgccgttaaggccagtggcgcatctgttgtcctgtttgatcacgcactttccgccgcgcaggagaggaatcttgagcgcctgtgtgaatgtcgggtgatcgatcgtaccggattaattttagatatctttgcccaacgggcgcgtactcatgaaggtaagttgcaggttgaattggcgcaattgcgtcatattgcaactcgactggtacgcggctggacgcaccttgagcgtcaaaaaggcgggattggcctgagagggccgggggaaacccaactagagaccgaccgccgtttgttacgtgaccgcattagcttgatcctcaatcgcctagagcgcgtggccaagcagcgtgagcaaaaccgacgcgctcgcaaccgggctgaaataccgactgtttcgctggtaggatataccaatgccggcaagtccagcctgtttaaccgaattacgtctgccgatgtttacgcagccgacaaactatttgccacgctggatccaacgctgcgccgtattaatgtggcggacgttggcgatacggtattggcggatactgtaggatttattcgacatttgccgcacgatttggtcgccgcattcaaagcgacattacaagaaacgcggcaggcttcgctgttattgcatgtgattgatgcagctgattcacgcgtgagcgagaatgtagccgcagtcgacaccgtgctagcagaaattgaagcggacgaaatccctacgctgttagtgatgaacaaaatcgatatgttggacgatttcgagccgcgtatcgatcgcaacgaagaaaacctgccggtcagggtttggctctcagccgaaaccggcgcaggtatcccgttgctctttcaagcgttgacggagcgtctttctggtgaaatcgcacactatgaattgagcttaccgcctcaggctggccgtctacgtagccgtttttatcagcttcaggcaattgaaaaagagtggatagaagagggcgggcatatcggtatggtggttcgactgcctatcgttgaatggcgtcgtctctgtaaacaagagcaggagctgatcgactacgtcgtttaattggccctttgggttaatgaaagagtcgggtttgatcgaacttgtgagattgagggccagcttcttatagggaagtgcgctcttggcctgaagaaaaccaatcatagaagaatggagctaaaacatggcgtggaatcagcccggtaataacggacaggaccgcgacccgtgggggagcagcaataataatggcggcaactctggcggaaataataataaaggtggccgtgatcaggggccgccggatctggatgatatcttccgcaaactgagcaagaaactgagtagtttcggcaaaggtagcggaagtggtaacggtggcgcaacacagggtcctggctttagcggacgcattgtgggtatcgctgcggtagccgttgtcgtcatttgggccgcaagtggtttctataccattaaagaagccgaacgtggcgttgtgacacgtttgggcaaactgagccatatcgttcaaccaggtttgaactggaaaccgaccttcatcgatgaagtgaccccggtaaacgttgaatccgtgcgcgaattggccgcttcaggcgtgatgctgacatccgatgagaacgtagttcgcatcgaaatgaacgttcagtaccgtgtaaccgatccggcagcttatctgttcagcgtaaccaaccctgatgacagtctgcgtcaggcaacggacagcgcagtgcgtggtgttatcggtaaatacaccatggataagattctgactgaaggccgcaccatcgttcgtagcgatactcagcgcgtattggaagaaaccattcgtccatacaacatgggtattactttgctggacgtcaacttccaggccgctcgtccgccggaagaagtgaaagccgcctttgatgatgcgattgctgcacgtgaaaacgaacaacagtacatccgtgaagcagaagcttacgctaacgaagttcagccacgtgctaacggtcaggcgcagcgtctgttagaagatgctcgtgcttatgccgcgcgtaaggtgctggaagcgcagggtgaagtcgctggctttgccaagttgctgccagagtacaaggctgcaccagaaattactcgtgagcgtctgtatatcgaaaccatggaaaaagtcctgggtcatactcacaaagtattggctaacgacaagagtaataatctgatggtgctgccattagatcaaatgctgcgtggacaggccggtgcggataaagccggtgctagcaaagactcaagtctgattcgtttgaatccgtcttcctctgcggcaagcagtccggagaagagcgcgactagctcagactctggctctgtcatggatcagcgccgggcaaacgcccagcgtgacacttccactcgcgtagggagagaataatcaatgcgtaagtcgatcttattcgtcgtggctgtggtgctgattgcgctctatgcttcattattcgtggtacaggaaggccagcgcgggattgtgctgcgtttcggtaaagtactgcgtgataacgataacaaacctttggtgtacgcaccggggctgcatttcaagattcctttcattgaaacagtgaagaccttggatgcgcgtattcagaccatggataaccaagctgaccgcttcgtgaccaaagagaaaaaagacctgattgtcgattcatacctgaaatggcgtatcagtgattttagccgttactatctggcaaccggtggtggcgatatttctcaggcagaagtgttattgaaacgtaagttcagtgaccgcctgcgttctgaaatcggtcgtttggatgtgcgtgatattgttacggattctcgtggtcgcctgacctctgatgtccgcgatgcgctgaataccggtaccgtagatgacgaagccgttactaccgaagccgataatgcgattgcttccgtagctgcgcgtgttgaagaggaaacccgtggcaaacagcctgcggtgaatccgaacagcatggcggcactgggtattgaagtggttgacgtgcgtatcaagcaaatcaacctgccggctgaagtttctgatgcgatcttccagcgtatgcgcgctgagcgtgaagcggtcgctcgtcgtcaccgttcacaaggtcaggaagaagcggaaaaactgcgtgcaactgctgactacgaagtgactcgtactttggcagaagctgagcgtcaggcgcgtattactcgcggcggcggtgatgcagaggcggctcgtctgttcgcagatgcattcagtaaagatccagatttctatgcctttattcgtagcctgcgcgcctatgaaaatagctttaacagcggcaacgatgtgatggtgttgagtccggacagcgatttcttccgctatatgaaatctccggataattccagcaaacgtccgtaagggggttcgcgtgtgatgcaaggcccgttaacgcgggccttttctttttgaggcagataatgaactccacaatctggttagcactggggctggttttggtgcttgaagggctaggtccgatgctctatcccaaagcatggcgtaaaatgattcaggcgatgacgcagttacctgactccacgctacgtcgttttggcggtgcattagtggttgctggcgtcgtcatctactacatgttgcgtagccgcatgggtggctgaatccaagcgcaaaaactgtgcaagcatgtgttaaaaagtgctgaaagcacacgggtgagatgttagaatccttttttaaggcaacctggtgatttttgagatgggtaagaacgtcgtcgtactgggcacccaatggggtgacgaaggtaagggcaaggtcgtcgacctgctgactgaacgggctaaatatgttgtgcgctatcaaggtgggcataacgctggccatactttggttatcaacggtgagaaaaccgttcttcatttgattccctcaggtattctgcgtgaaaacgtaaccagcatcatcggcaacggtgttgtactggctcctgatgcgttgatgagagagatgacagggttagaagcgcgcggcgtaccagtacgtgagcgactgttactctctgaagcatgcccgctaatcctgccatatcacgtggctctggataacgcgcgtgaaaaagcacgtggttcgaaagctattggtaccaccggtcgcggtatcggtcctgcctacgaagataaagttgctcgccgcggtctgcgcgtgggtgatttgttcaataaagaaaccttcgctgcaaaactgaaagaaattgtggattaccacaacttccagttggtgcattactacaaagttgatgcggttgattatcaggaagttctggatagtctgatggctgtcgatcctcagaccggcgtttctgttgccgatatcctgactggcatggttgttgacgtttctgaactgttggatagcgcccgtaagaaaggcgagctgatcatgttcgaaggcgcacaaggcaccttgctggacatcgaccacggtacctatccgtacgtgacttcgtctaacaccaccgcgggtggcgttgcgacaggttctggtatggggccacgttacgtagattacgtactgggtatcatgaaggcttactctactcgcgtaggtgcaggtccattccctaccgaactggaagacgaaaccggcaaattcctgcgtacgcaaggtaacgaatacggtgcgactaccggtcgtgaccgtcgtaccggctggctggatatcgttgccgttaagcgcgccgttcagatcaactctctgtcaggtttctgcatgaccaaactggacgtgctggatggcctgaaagaagtgaaaatttgcgtgggctaccgcatgccagacggccgcgaaatggatacgactccgttggcagctgaaggctgggaaggtatcgagccaatctacgaagttatgccaggctggtcagaaaaaaccttcggagtgaaaaagtacgagcagctacctcaggcagcgttaaactacatcaaacgtgtagaagagctgactggtgttccggttgatataatttctaccggcccagatcgtgacgagactatgatcttgcgcgatccatttgatgcctgattgatagatacaccgtcaaatccatgcgatcaaaatactcaaaccgggcttatgcccggtttgttgttcctcgataagcagtttttacgccaaaaacctccgcctccacctaaatgattagccgcaagctttgtggctggtttatcattcaaagaatacgctttcataaataacacttagactggtgtcatcgcagatgagctttagcagagtacactgatactcaggggtatacgtgcagttaacaagttttactgattatggcctacgggcgcttacctatatggcttcgttaccgccggggcagatgactagcatctctcaggtgaccgaggtctatggggtatcgcgcaatcacatggtgaaaattatcaaccagttgagccgtgccggattagtgaccgcagttcgaggcaaaaacggcggcattcggttaggcaaaccggcagaaagtatccgtatcggcgacgtcgtgcgtgaacttgagcctctgtctttggtgaactgttgcagcgatttttgccatatcaccccagcctgccgtttgaaacaggtgctccaccaggctgtacagaatttccttaaagagctggataactatactttggccgatatggttaaagataacgctccgctctacaagttattacttgttgaatagtgtgtttgcttaatgaataacgttgagcaacctgctgatgactacggaggaaccgcaatgtcacaagatcctttcctggagcgagaagcagagaagtatgaatcaccgatcccaagccgggaattcattttagagcatctcgccaaacgcgaaacgccagccagccgtgaagagttggccacagaactcaatttatccggcgaagaggctttagaagctctgcgtcgtcgcctgcgtgccatggagcgcgatggccaattaatctttacccgccgtcagtgctatgcgctgcctgagcgtcttgatttactgcgcggtaccgttattggtcaccgtgatggtttcggtttcttgcgagttgaaggcagcaaagacgatttttacctgtcctcagaccaaatgaaaatggctattcacggtgacgtggtgctggctcaggccatgggtgccgatcgtaaaggccgtcgtgaagcgcgtattgttcgtgtattagtgccgaaaaccagccagattgtaggccgttactttaccgacgcaggcattggtttcgtggttccggacgacagtcgcctcagctttgatatcctgattccgccagattccatcagcggtgcccgcatgggttacgtagtggtggtggaactgactcagcgcccaactcgccgcagtaaagccgtgggtaaaatcgttgaagtgctgggtgaaaacatgggcaccagcatggcggtggatatcgctttgcgcacccatgaaatccctcatacctggccaccgcaggtggagaaacaagtcgcagatttgaaagaacaggttcctgaagaagcgaagaaaggtcgtgtggatctgcgggatctgccgttggtcactatcgatggcgaagatgcacgtgactttgatgatgcggtgtactgcgagaaaaaacgcggcggcggctggcggctgtgggtagcgattgcggacgtgagttattatgtacgcccgcgtaccgcactggatgacgaagctcgcgctcggggtaactcggtgtacttcccgtcgcaggtcgtacctatgttgccggaagtgctgtctaacggcctctgctcgctgaatccgcaggtagaccgcctgtgtatggtgtgtgagatgaccgtctcctcccaaggcaaactgtcttcctataaattctacgaagcggtaatgagctcccacgcgcgtctgacctataccaaggtttggcgaattattgatggcgaagaatcattgcgtgagcaatataagccgttggtaccgcatctggaagagctacatgcgatgtataaagcgctggatcacgcgcgtgcagaacgtggcggcatcgccttcgaaaccgaagaagccaaatttatcttcaacgcagaacgtcgtatcgaacgcatcgagccaactatgcgtaacgatgcgcataaactgatcgaagaatgtatgattctggctaacatcgcggcggcgcgttttgtcgaaaaacataacgaaccggctttgttccgtgtccacgatcgtccaagtgatgaccatatttccgcactgcgtagcgtgctgaatgagctgggtctggtattgggtggtggaatgaaaccagagccaaaagactatgcggttctgatggatgaggttgccgatcgtccagatcacgaaatgctgcaaaccatgctgctgcgttcgatgaaacaggcgatttacgatccggaaaaccgcggtcacttcggtctggcactggcatcttacggccactttacttccccgattcgtcgttatcctgatttggcgatgcaccgggcaattaagtatcagctagccaaagagcagggttcggtgaaagaacgttggacaccaaccggcggctggcacagcgattacgaagatatgctacaactgggcgaacattgctctatgactgaacgtcgggctgatgaagccacgcgtaacgttgctgactggctgaagtgtgacttcatgcaagatcaggtgggtaaagtgtttaccggtattatcgctagcgtgaccggttttggcttctttgtgcgtctggacgatctgtttatcgacggtttggttcacgtttccagcctggacaacgattattaccgctacgacaatataggacagcggctgatcggcgaatcttccggcgtggtttaccgtttaggtgacaccgttgagattcgtgtggaagctgtccacatggatgagcgtaaaatcgactttgctttggtatccagcacgcgtaaaccgcgcggcgaagggaaaacggcgaaagacagagagaaaaaagcgggccaacgtaccatgcgtggcagcgcaccttcacgtcgtgaaggcggacaatctcgtcgcggtgctgccgatggcggcgcgagtagtggacagaagcgtaatcgtcgaggcaagaaaccggctaattttgagcctgatagcgctttccgccctgatgctgacaagccaactgacaaagcggctgcggagaaaaaggccaaagcgaaaaaaacgtctgaaaagacccggaagattgcggcggcgactaaagccaaacgagctaagaaaaagtcagccagttagtatccacagggcggcggagcgtcgccctgatcaaagcctaacccttagtgttacgcattatttaatcaacggcgggtcctgtataggattcaccgacacatgtaaaagagcatcatgagcgaaattatttacggtattcacgccgtcaaagccctgttagaacgcgatccgcaacgttttctggaagtttttatcctgaaaggacgggatgaccgtcgtttgcagccagtagttgcagagctggaggccgctggtctggtggtgcaggttgctagccgccaatggctggattctcaggtagaagacggtgttcatcaggggattgtcgcgcgtgtgcgggaaggccgtcagtatcaggaaaacgatctgccaagcctgctggccagcgtagaatcgcctttcctgttggttttggacggcgttaccgatccgcataacctgggagcttgcctgcgtagcgccgacgctgctggtgtccatgcggttatcgttccgcgcgatcgttccgctcagctgaatgcgacggccaagaaagtagccagcggcgctgcggagaacgtccctttgattcgagtgaccaatctggctcgtactttgcgcgtattgcaggaaaataatgtctggatcgtgggtaccgcaggggaagccgatcatacgctgtatcaaagcaagctgacggggccaatggctctggtaatgggcgcggaaggcgacggtatgcgtcgcttgactcgtgagcattgcgatgaattaatcagtattccgatggcggggaccgtatcttctctgaacgtatctgtggcgaccggtgtgtgtctgttcgaagttgtacgtcagcgcggtttgaaagctaaagcctaattattttcatagcgccatatttttaaaacttaatgttgttaaaggcagttcccgcgggggactgcttttttttgccttaaatatactcaaagatatatttaacacacaattaaaacagatagttaacgatgtttccatgatttaataattcagcaaatagatattattatattttataaagtcctaatgaaatctaataactattaattacggattgttcctattcatcagtatatttatccagcagtaagcatttatgtcagtgatcataaaatgcattacttctggtgtctttttatgtacatggagagttatgaaatggaaattaaatctataagattcaaaacaattgctgctctgatcctttcagctgcgttaactcctgcagcctttgctgcggataacagcgcagaaattacggttaaaggtaaattgatgccgggtgcctgccaattggatgtaaacggcggagaaattaattatgggaatatttctttacaggagttggttgaaaaagaagaaagaatcatcgatttaggaaagagaaatattgagtatgctattaactgccctcataagacagcagtatcgatgagctttgtcgataaccgtaaaggtagtgttccggctgaaattggtacctcttattttggtttgggtgaaggtgctcttaatatggatgatgtaaaggtcggttttggtggttataaagtctcactgaccgaacctaaagttgatggagagtctgcgcttctaggcggtattaatgatgttgaaggacaagcatcggtcgacttagataagtttgaagatcagaatattacttatttcaacgctgataaaagtatttttgaaggggcattattttcgggtcgctataacgtagatactaaaatcatcaatcctaaagagtttaagggaggttctagtattgaacttgatggttccgttaccatgaatgtgtcttatctctaataacctctgttaattaaatgggtgctgtatggcatccatttattgctattctattgccatgataagtaaagaaaataaggctatagggatataaatttatataataaacggataatttatgatgaaggttaatctggttttatcagtggctattttattttctatcgcaagtttttcccgcgcgaatacaaccggctcttcgactccgggtatccaaattaatgactcagtgattgtcattaatactgcggaaggtgaagcgaccactacgttgaccaataaggccgctaacccggtaatgttacattcttccgtggagtttgtagccgaagataccgccgagaaagtgattgtcacacccagcgttgcccgtattgaagccggcgagacacaaatggttcgtttcttcctaaaggacgaatttagaaactcactgactcagcaaaccatggtcagagctatattccagaatattcctcctaaaggaaagaataacgttcgtttgaccattagacacaacattccgttgattattcatccttccggtttagcaactcacaataaaccttgggagtttcttaagttcagtcgcaatgcacaagggaacattcttgtgaaaaatgaaggagactatgtagtccgtttatctaattctattgagttgcagccaggaaagggggctgctgagttaacgcagaattatattttaccaggaaagagtctggtggctattacggataaggcatttaaaggtcaggcgaatagcgtcagaatacaaccagctaatttatacggatatattactgagtcctattcttccgaactgaaatgatcgttagataatatcgatgtaaagctcgttgtatcacacggagatagaaaaaatgaaaccgaagaagaatagcattcggttatttttatatttcagcatttttcttatttccgtgagatctttggctgatgatggcgttgagtttgatattggtattcttgaagaacgcggtgtttctgccagtgcggcagactactttaaatataaagccagatttagctcaggagatcattccattgagttaactattaatggtgtagctcgcggctgggtagatatgacgtttaatcagcagggtgaaccgtgttttagcccggatttttaccaaaaaagcgggattattcctcccccaatggaaaacggctgtagtgatttacggctacattatcccagagctttggtgaatttattccccagtacgtcacgtattgaagtgattctcccggcggaattattacaagtcggtgaagttgttacggggaattatgaaaccggaggttcagcgttgttaatgaattacgacgcactggcgataagaaatcagaacggtagcaataatctgcaagcctccacggaggctgggtttaatagcggcaactggatttttcgttcccgtcagatctttagctataaggatcggcgacagcaatggagcaggctatatagttatttgcagcgtacttttatcgaaaaaaaaacgacgttgcaaatgggagaaattaacctgaatagcggcttattcagtacgccacaaatttacggattgcagataatgcctgaaagtgctttagccagcagagaaggcagcggagcaacggtgtcaggcattgcgccaacgcaatcaagcgttgagatacgtcaacgcggagccttgatttacgtgactcagttgccgcccggccccttcactttaacccaaattcctattaattccaccggtgcagatttattggtatcggtgataggcgtggatgggcagactcagagtttcagcgtgccggcggcgagtttcaacttgcagtatgttcccagaacgcgcggtatttatgccggaatgggtagaaccgggccaggttctaatcagcatcaggaaagctggctaggaacgttgacagacgttcgcccgttaggcgacttatcggatattactcagggtgttttgctgggttcccgttaccactctgccggattggcagtaaataccggtttgattccccgaactttttgggcggtgaatgcggtgaccagttgggatcgccagaatgaaaaacaaggcgttcaatggggtagccacgttggcgtgaagctggtttcctcattgaaactgaatttatcgactatgcatcgaacggctggatttcgccagtttcagcatagtttgcgagaaaggccagtggcggagttacccgcagtagagccaaagaataaaaatcctaacgcggataaaagtggcgttaagaatcaatacagggcgcagttaagttatagccaatcgttgttgggcggaatcagtctgggttatacccaatcggtatcttttgctaaacagcaggaacgccgttggagtttggggtggaataaacagctgccttacaacattaattttaatctgaatatggaaagaaacctgaatagcaaaggagacaagattatctatggaaatatcagcattccgctgaattctaatatgtccttaagcagcaccgtttctcaaagcagaggaagaactcagcaacgcgttggtttgaatcatcaggttaataatcagttgggttacagtctgggggtaagtcaaaccgcgaatcaatcggggcaggcgctcagcggtacgctgagggtattacctaaatatgctcagttaggcgtgggttattttcaggatagcgcgcgaaatagcagctatcagcttcaggccagtggcggcgtggcggtgcatagtgcaggcgtgactctttcaccttatgcgattcaggatacttttgccgttatcgcgctgccgggcatcagcggtgcagaaatacaaactaattcaggtccggtatggaccgatcggcgaggctatgcgttggctcccagtttgtcgccgtttagctcctctcggctagaagttaacactaagaaactggcgcgaaatatcgatattaagaatggtattcgattagtggatgccagccggggtgcggtacttaattataatttcaaagcaaataaaactcggcgaattttgctctcgatacgccttgcatcgggggagtatgccgctgaaggcagtgatatcacggataaagaagataattatgttggcactgttggtagcaaaggaacgttgctgctgagcaatagcgacggaaatccggacttatacattaaggacaatgaaaatgagatatgccagttggattacagtctgcctgaggcaaaggatgcgccggttttatatgaagaagctgatgcccgctgcctgtaaaaatactcccttcagcggcggttttaaactggcggtagcggccctactgctaagttttaccggaacggcactggcgcagtgccacatcagcgtgactcaatcccaactgcatttcggctccctgcctcgtgcccagcttaagggcgcgaccgatcgcggcgtcagtttgggaaaacactatttcaatgtcgatgtgcagtgtccgcagccgcgtttatttgccatcgcttatcaagggaatagccaaagcggcgaaagctattctttggattcagaccacgccagagttgagctgacgccttctgccgcgcaggctgatgggcaaccggtcatattgtatctcggcgctcgctctgcttttcccgcagggaataatgcggaacacgccagactccccctgcatccattgactcgaaatatgatttaccccggtcggcgagcggttagccaattaagttttcagatgacggcagaagtgtggctggcggcaaatgcacttaaccgcggtgaacgggttcacctgaatggcattggcacttttgacgtgatggagtaccaataatgaaccgttctctcaatagatattttgctcgttatctttcgattgtagtgggaacggtgagttacctatttgctcatttggctagcgcagagacttctgtcagcatttatttcagcgctgaaatcgagccggtagcctgtcaggtttccatcgatagcgccgttgattatggcgaaatagctcagtccaagctctctgaaacccactttactgctttgtcgcatcgggcgttgccgcctatcagcgtggaatgtgacgccaaaactgcgctgggatttaaggcgacggataaccgttccggcatcgcgacggatgccagactgattggcagcagcggtacggttattccgccagaacatcattttagtcttgggcgaacctcagacggacagccgattggtgcctggggcgtgatattttcttccggcacggtggatggccgcacggcgttgattgccggaacctcggcggagccattccatgcggcgaatacgttaaacccgaaaggaaaagtggctcaatggatggagaatggcactctcgctattggtgaaacctttacgctgcaaggggaagttgtggccggtattgcgaagaaatccgaattacctagcggcgatattattgttctggatggcatggctacgctggaaattgtttatttgtaaattagttagctgtaaatagtgggcgattaactttacgctttctcccgcattatctgtggtgatgatcggcaaaagtaccaggctgaaccatacttaatcctgatttttatgctaatgaatctgagggagaaaggtatggattggcggacgcacgaagtgttcaatcagcctgagccattatcaaacagcaatttatttttgtctgatatggcgttaagggaagctgtcatacgcgagcaagccggttgggataatgaagtattaatttcaatgggcgcgcagttgggatcggcagaatcgctggagttagggcgtttggctaatacaaatcctcctgaactattacgctttgacgcagctggacggcgtctggatacggtcaggtttcatcccgcctggcatgttctgatgaaagggttggtaggcaatcgggtgcataatctgagctggcaagaagatgctcgtatcggatctgtggtggccagagcggctcgtttgatgctgcatatacaggttgaggccggaaccctttgcccgataaccatgacctacggtgccattcctcttctgcaacaatccctacctgcgcaatttcaatcctggatatctcctttactctccgatcgttacgatcctcacgtcgctcccggtgatcaaaaacgcggtttattgatcggtatgggaatgacggaaaaacagggggggtctgacgtcttgagtaattccacgcgagcagagcctttgggcgctcgcggtgccggtgaagcttatcggttagtcggtcataaatggtttttctccgtgccgcaaagcgatgcgcacttggttttggcgcaggccgaaggtggattatcctgtttctttatgcccaaaattctgcccggcggcagcagtaattccattcgtttagaacgcctgaaagacaagctgggcaaccgctccaatgccagcagcgaagtagagtttgataatgccatcgcctggctattgggcgatgaaggggaaggcatccaccatattttaaaaatgggcggccatacccgtttcgattgtgcgttaggcagccacggcattatgcggcgagccttttccgtcgctctggattatgccagccagcggcaggcctttggtaagaatctgaccgaccaacctttgatgcgtcaggtgctcagccgtatggcgctgcgtttggaaggccacacggcgctgttattccgtttggccaaagcatgggaacacggcagcgcggaagacgcattattcagcaggctgatgacgccggccgccaagtataaaatatgcgggcagggcagcgcttttgtcgccgaagcgatggaggtgttaggcggaatcggctattgcgaacaaagcgaattgccgcgcttataccgtgaaattccggttaacagtatttgggaaggctccggcaatattatgtgtctggatgtgctgcgggttttgcgcaagcagcccgcagcgatagaaatgctgaatcaaaatttttatgaagttcgcgggcagaatcgtttgttcgaccgttcttggcgccagttggctttccggttaaaaaatccgcaggaagcacaggggcgagaattgacgctgcaactgtttaatctgaactgtgccgctcaattgttgcgttttgcatcgccgtcgctggccgacgcatggtgtcgtatgatgctggatcatcgggatcaatattctattccggaaccgctttgcgaactgttactgacccgagccgcagccgtttagcgatacagaatggcctgtgagtaccactgacccggaatgacagaatcgctattcataatgactaaatagtaacgggctccgctggcattggctttgctacggagtgccgcttcagcatccatcgggctgccatatacctgcaccgaagccatcccgattttttgtaatgttccgctttgagctcggttaatttcctgcgcgaaaggctgtggcgcgggaggtggtagcggcgtggttttcaatgcgctacaggcggaaaggctcagtgtgaacagtagaacgacaaaggcgcgataataggtcatggtgtgtttcctgtgttgatattgccccactttctctcagtgtaacgctcaaacattcataacgaccagatatgtgtcatttctgatatatctcggaggagattggtttaagactttattcagcaggtttggcactatggcggtgcgtttacaattggtttggctgataaggcttgtttgacccataaggactgttgttatggttgaaatgtcgttagaaaaagtacagggcattgaggtaattcacgccgcgccagcaggccagcgtcatcagcctttgccgacccttttcttctatcacggttatacctcctccaaagaagtgtattcctattttgcctatgctctggcgcaggcgggatttcgcgtggtgatgccggatgccgatatgcacggagccagatttgacggcgatgaaacccggcgactaggctgtttctggcagattttgcgttcaaatattgatgaaatggctggaattaaagaacactatcaacaaactggattaattgatggcgatcgaatcggcgtgggcggcgcctcaatgggcgggatgactactctgggagccttggtgcgctatccgtggataaaggcggccgctaatttcatggggtcaggttatttcacttctctggccaaaacgctgtttcctcctttgcccagtgctggttcaacaaagcaggatgaatgggaacgacaaattgctccgttgattgaatatgaggtaacccaccaactggagagaatcgcccgcaaacctttgctggtctggcatggtgaagcggatgaagtggttccggcggtggaaagtgagcgtctggtcgcagctttgaaagagcaggggttggatcatcatctaagttacctgaccgagcctggtatcggccataaaatcacgccaacggcgctgacggcgggcgcggcattcttccggcactatttatagttatagccgctcatttattggcatttatttataggcactaaaggccagaaaaaacccccgatagacgggggttaagtgttttaagggctgtattgttttactgtcggtctttctctggtgttgtatttatctttgcaattctagcggtaaagaacagcgttaatctgaatagagctgttgccgccaggttcatgcatagcgatgatttgataggcggttgcgccgcgttcatcggctaatttgctaacctgtgaggttgcatcgtcaggggaaaccacattgtgacccagtgacactgcgccaacgctgacacgctgttgctgcattgcctgttgagcggtgatttcagtggcggcgaaagtgctggccgataggaagaaactgaggatcgcggcgatagtgagcgtgattttcataggtgactccaatattttatttatatactttgaataagtttcctggctgctgcgccgcttgttatgcggtggatgtaactaatagtagttctcttttataattaataaatgcgctattgctgactgactctttcaaaaaatatgaatgatttttgcgctgacctaatgattttgttgaaagatttaaaaaactaatggatctccatccatagttcatttggtgaacaaaaagtgctatttattggctagaacggatatagctcgaataattcctctgcaatccttgagtttccctcctcgcgcaagtatagttacgcgtcatttttcggccgcacacaaacacgttccttgcctccatgggccgcggctgaccctatcaggaggctgaataatccgtaaggagcaattcgatgcgtcattacgaaatcgtttttatggtccatcctgaccaaagcgaacaggttccgggcatgatcgagcgttatagtgcaacaatcactaacgctgctggtcagattcaccgtctggaagactggggccgccgtcaactggcttacccgatcaacaaactgcacaaagctcactacgttctgctgaacgttgaagccccgcaggaagcgatcgatgagctggaaacaaacttccgcttcaacgacgccgttatccgtagcatggttatgcgcgttaaaaacgcggtaactgaagcatcaccaatggttaaagcgaaagacgaacgccgtgagcgtcacgacttcgcgtcagaaaccaatgatgattctgaagctggggattctgaagagtaattgccgtggtggccgctaatcgactggtactctctggcactgtgtgcaagacacccattcgaaaagtgagtccttctggtattcctcactgccagttcgtgcttgagcaccgttcaacgcagcaggaagccggatttagccgacaaacatggtgccgaatgcccgtgattgtcagtggacaccagtcacaagcattaactcacagtataacggtcggcagtcagttaaccgtggaaggcttcattagttgccatcaagggcgcaatgggcttaacaaattggttctgcatgccgagcagattgaattgatagattctggagactagcctaatggcacgttatttccgtcgtcgcaagttctgccgtttcaccgcggaaggcgttcaagagattgactataaagacatcgctacgctgaaaaattacatcaccgaaagcggtaaaattgtcccgagccgtatcaccggtactcgtgccaaataccagcgtcagctggcccgtgctatcaagcgcgcgcgctacctgtctttgttgccgtacactgatcgtcatcagtaatcggccactgtccattaacgactttgagaggatatggtaatgcaagttattctgcttgataaagtagcaaacctgggcagcctgggtgatcaagttaacgttaaagcgggctacgctcgtaacttcttagtaccgcagggcaaagctgtgccggcaactaagaaaaacgttgagttcttcgaagtgcgtcgcgcagaactggaagccaaactggctgaagttctgtctgccgctgaagctcgcgcaactaaaattaacgaattgggcagtgttacaatctcctctaaagcaggggatgaaggtaaactgttcggctctatcggtactcgtgacatcgctgatgcagtatctgcagcgggcgttgaagtagcgaagagcgaagttcgtttgccgaatggcgttctgcgtaccactggtgaacacgaagttcacttccaggtacacagcgacgtgttcgcaaaactgaacgtagttgtggttgcagaagcgtaagttacgctgctgttaaccgttaaaacgccagcctcgagctggcgttttgcttttctgagaacgacaaaaaagcccctgtaaccctgccagttgcgataattcctttccagcatccagacgtagcgatatcacgccgcgagcctttggttgggcgcagatagcctacagagagagaaatgggtgacagcggcgtttggatcaaagcccaggccagattatggctgcaaaatctgggctttatcagtccttggcattcgcgctgaggattatcgatcgcggcggtaagaaccgtccgcttggcggctaaacaatacttccgcactgttggccgtttcaatagccagcgcggttacgctgccttgcgcgtccagtatgattttcacttcttgtccggctttcaggttgctcagtggcttatcattgccttccacctgcgccatggcaaacacttcatttaccggtaaattattatcgcggaacagctgggccaacgttttacccgcttgtacctgatagctttgccaattcccctgcggtaacgttgaggacggctggttgactgcgggattgctcccgcgtaattcggcctgtaacggaatatctgtcggttctgccgtcaccgggaattgcccgctgccgttgttaccggaagaaggccaaagcagtgccagcaacaataccgctgcggcaatgatgacccagcggcgatggaagagaggcaagggctccatccaatggaaatcatccggcagatgccagattttttgcagccagtctttaatcacggcttgctttcccggcgacttgatctgcggtgctgatactttgtcgtcatccattaccgtttctggcggtaagagatcgggctcgccaatggagggctcggctttgacgcggttttcaggctcatcggtcggtttatctggcagaattcgctgccggatagttagccaagtgtgtaacaaaggctggtagacccgattgtttttccttctcctgggcgcgattctgcccatggtgacctctctttcaacgacgtaaaaaaaatcacagtgctcgatcagcgactgctggatggaaccttttccctgttacttgttagtatagtttgctaactgattgatgcagaaagaaacagggataatgctgccgaacgggctgttttaagtcagtgcagaaccattgtttctttttcttcgacaaaagtcatcattagcgatgcaagattttaccctactcccttgctgctgttatgcttgcaccttcgactttttagagaattaaggaaaatccatgacaaccccttcttttgatagcgtagaagcgcaagcaagttacggtatcggtttacagataggccaacaattacaagagtccggcttgcaggatttgcagccagaagccctgttggcgggcttgcgcgacgcaatggaagggaatacaccaacagttcctgttgatgtcgttcaccgcgcgctgcgtgaagttcacgaacgtgccgatgctgttcgtctggagcgccagcaggcactggttgttgaaggcgctaacttcctggaagaaaacgctaaacgtgatgaagtgaccaccactgaatccggtttgcaattctccgtgctgcaacaaggcgaaggtccaattccttcacgtcaggatcgtgtgcgcgtgcattataccggtcgtctggttgacggtacggtatttgatagctccgtagaacgcggccagccggctgaattcccggttagcggcgtgatcccaggctggatcgaagcactgactttgatgccggttggctctaaatggcagttagcgattccacacaatctggcctacggcgagcgtggcgctggcgcatctattccgccattcagcgcgctggtatttgacgtagaactgctggaaattctgtaaattctgagcggttagtgtgaaaaagggcgatccaggatcgctctttttttatggcttttctacgacttagttgccacttaacgctctgggaaatagcagattattttctaagtgaacgtgttccatcaaatcgccgacgaattcgttgagattggcataaagtgcgcgccaggtggtgcaggctccaggtgggggcgtgatgttattggtgatctgtttgatggtttccaattgctgccctgccgcttcgtgctctgattccatcacgaaaatcggcacgctagccattttccccattcctttggcaatcatggggaataacactttttcctctctttccatatgctgtaataaatcctgatgtagcacgctgagctgcactgctaaacctcgtgggcaggtgggttttgcggcatgtacgcgctctaccttttctgccattaacaccagctccggcaattgctcgcggtgccgttcatgatagcggttgagaataaaactgatcaggtgctcctgtggaacctcttgccagttctgcactgcctgagtttctttttgcaacatggtgagctccgcttccaacgcgtcaatattcagagccctgcgctcggcggcacgttgtagtgtctgtttccctccgcagcaaaaatcgagttcataccggcgaaataacgttgtggctcgtggtatggcaatagccagagaaccgagagattgattgcggtaatccattatgacacctctttaatgtgtaacttctataagttgcattataaatgcatgttaatgtgtgtgccatagttattaagaggtagtaaggatgagggagaaagagcaaaagcgctccgtagagcgctttaaggagggattacttcttctgcaaatcgacctgataaacttcaaaaccaatgtcatccagtccctgtgccttcatgggatactgggatttttgcttgataaattcagcggctttggcacttggtgaagtttcaaaacgaatatccaacggctgcgaactggtgatttcggctagacgccagttgttatcagcctgaggcttaacctgaccgttcttcttggtttctgcgctgatataggcagagagtaccgaacggttctcatccggtgaagcaaaggcaatatggtcatcgccggtgcccgcgaatttgccactgtaagcgcggtagttattggtcgcaatcaggaaagtggcctttggatctagtggcttacctttgtaagtcaggtttttaatacgttcggctttatcgttgatcagattacagtcgccgttgtagcgagccggctgtgtcacatcaatttcatagttaacgccgtcaatcacgtcgaagttataggtacggaaaccgttccagttaattagcgactgcggtttgctgcttttcacatcgatctgattgaattgcccggcagagcattccagccactgcttcacctcagcgccgctggctttcactacgaccagagtattggggtagagatacaaatccgcggcattacggaaggttaaatcacctttttcgacttcaacaaaactggccggatcgtttttgcgaccgcctgctttgaacggcgctgcggcagaaagcacgggtaaatcggccagatccggatcgccctgaataaagtgttcggtataggcgcgctgagcgttgttgacgatctgtaccgttggatcgtcctgaatcagcgacaggaagctatacatattatcggaggcttttccgataggttggctgacaaaatcgcgggtgcctttatggtcatcggccagtactttaaccagcttggcgttttccggtgccagcgattttttgttggttttatcgtagatagggcgggcttctgccttcgcctgttcgacctgccagctacctttatcgttattcagtacaaagtctacaacgcctaaatggtcaccccattggcccggcattactgctggaatgccgtttagcgtaccttgcgctatatccgcgcctttaatcgcagcgaaatctttacttgggaagacggcgtgggagtgcccgaacataattgcgttgattcccggaacctggctgaggtaataaaccgagttctcagccatggttttatacggctcgctggataggcctgagtgcgggatggcgataatcaaatcagccccttgcttacgcatctccggtacccattttttcgcggtttcggtgatgtcgtctacacggactttgcccgtcagattggctttatcccagatcatgacctgtggcggaacaaaaccgatataaccaatgcgtaaattatgggttttaccgtcgcgatctttaaccggtgtatcggcgatcaggaaaggttggaacagcggtttaccggtttttacatcaatcacgttagcatttacataggggaattttgctcccgccagagatttcttcaggtaatccaggccgtagttgaactcgtgattaccgatgtttcctacggcataatccagcgtattcattgctttgtagaccggatgaatttcgccttctttcaatcccttggctgccatgtaatccccgagtgggctgccctgaattaagtcgccgttgtctaccagtacgctattaaccgcttgctgacgcgctgcgtcaatcaggctggcagtgcgaaccaaaccgaactgttcagtcggtttatccttgtaataatcgaaatccatcatgttgctgtggagatcggtggtttccaatacgcgtaaatcaaccgtagcggcctgagccgcgctggcaatcagacaggcgagtagggacaacgtcaggggacgctttatcatggctttctccattgtggctttccatatgagagctattcgacatgtatcgcaaaagcagatgtaattttaattaattgtggcaacaaagtgtgaagtttggcagaaagccagccagattaacgcgtagacgctcacagatgcggcaggttaatccccttgattttattacatgttaagttggcgatggctattaatggcaaaattcactagtctgctactcaagccgaattcatcctttaggtgaagtttattttggtatttacctctaaaataaatagagggaaaagggcgttgccgaccggtaacagccggactgcggtgagccgaacagcgacgaaaagaatgatagataacttcagaggtggatgatgttagagcaaatttgccagttggcacgcgatgccggggcggcgattatggccgtctacgatggagagaaacctcttgatgtagcacacaaaaaagatgattcgccggtaaccgcagcggatctggcggcgcatcatattattaaagccggtctggcagcgctgacgccgaatattcccctgttgtcggaagaggatcctccggcgtgggaaattcgccagcactggcagcgttactggcttgtcgatcctctggatggaactaaagaatttcttaaccgaaacggtgagtttaccgtgaatatcgcgctgatcgagcaaggcgcgccaatcttgggcgtggtgtatacgccggtgacggatgtgatgtacagcgctgagaacgggcaggcgtggaaagaggaaggcggacgtaggatgcagatccaggttcgtgatgcgcaactgccgctggtggtggtgagccgttcccacagtgatgacgagctaagagactatctggctcagttgggcgagcatcaaacggtatccgtcggttcttccctcaagttttgtctagtggccgaaggaaaggcgcaattgtatccacgttttgggccgactaacgtttgggataccgccgcaggccatgcggtggccgtcgcagccggagcgcaggtcaatgattggcagggcaaacctttatcttataccccgcgtgagtctttcctgaaccccggcttcagagtgtcgctgttttaagacttcagcaactggtgcagttgggcgatgacctgctgcacttcttccgcgcttaatgccccatctttaacgaaacgaacgttaccttgctgatccagcaccacgatggtggagcttttggcggccagatcccaagctttcttcacgttgccattgctgtcgacaataaactgcgaccagggaaactcacgcttactgtcttcaatgctgttacgcacaaacatagcagtgccgataatggcgtcatcggtatcgacgattgtcgtcgtttggtaacgatcgtgcggtaatttggcggccttgattgcttcaatcaagggggcattcatctctttggcactgctgcggccggcgatatgttgcaccacccggactttgccggctaattgcgagctattccagtttttatagctaaacttattattagccaaatccagttcacctttatcactaacacccaccggcggcacacgctgatcgagttgaatgttatgagccgaggcaagcaaaggtgtgaaaataagggaaagaatgagcaggctattttttatcatgtgatgtccttgacgatgctgaacgatggaattaggcacttgcgccgcgaattgaggcaagttttcaaatcataggtgcagatcagaggtctgtcctgtctgatgccgattttagtaatcgttactgtttagatggttattctgccttaacggccgtttatgttcgtgtgattctgtaattttatgtaaacacagtatgtatgactacttttggcggaacttagcgccactcttcaggtctattactctgcaattatcttacgctacctgtgatcctggtcgcttaggccattcgcggagcgtatttgtgtcatgggaggaaagcaaaaaaatgaggatcttccagcgttacaaccccgctaaagtcgcgatgtatgtcaaaaccctattccgcggtcggctatacatcaaggatatgggggcttttgaattcgacaaaggtaagattttgccaccgaaagtacgagataaacgccactatagcgtgatgtccgaggtcaaccgccaggttctacggctacaggcagaaatgggttgataaggcgtaaaagcagtagcgccgaatgaattgcggccccgataatggggccgctagtattttcagcaagtcattctgctcgtatcaatcaggcatcgctgctttcgtgcggcgctttgggcagaatgggagccggagtatcagtgagcttggtaaccagtagctgatcgatcttgtagctatcgatatcgaccacttcaaacttgtagcccgcatacttgacgaaatccgtgcgtttcggaattttacgcagcatatacatcataaaaccgccgatggtttcataattgccagactgcgggaactcatcgatatccagcacgcgcatcacgtcatcgataggcgtaccgccttcaatcagccatgagttttcatcacgagcaacaatctgttcttcctgcccctggccgactaaatcccccatcagcgtggtcattacatcattcagagtaataatcccaaccaccaatgcatattcgttaagaataacggcgaagtcttctccggcagttttgaagctttccagcgcttcagaaagcgttaaagtatccggaactataagcgccgagcggatttgtacgccgctgctcagtaccaaactctggttgcccagcacgcggtttagcaagtctttagagtcgacgtagcctacgacctgatcgatatggccgtcgcaaactaaaaacttggagtgcggatgagtcgcaattttctctttgatgctttcttcgctttcccgcaggtcaaaataaatcacgctttcgcgagatgtcattgatgacggaacggtacgggattccagctcaaaaacgttctcaatcagttcgtgctcttgtttgcgcagtaccccagctaatgctccggcttccacgacggcgtagatatcatcagatgtaatgtcatccttgcgaaccattggcaacttgaataaacggaaaatcaggttggccatgccgttgaaaaaccacactaacggacggcagatcatcaggcagaaacgcatcgggttgacgatccggacggcgactgtctctggtgcaatcataccgatgcgcttcggggttaaatcggcaaacaggatgaacaagctggttaccagaacgaatgagcagatgaaactgacctggtctgccatttctggcgacataaagcgctcgaacaccactttgaatgacggcgagaaagcggcgtcaccaacaataccacccaaaatagcgacggcattcaggccgatttgcactactgtaaagaaaatgcccggcgtctcttgcagtttcagcacccgaagtgcgttgatgtctccctcatcagcaagaagtttaagtttgattttgcgtgaagcagccagcgatatctccgataaagagaaaaaggcacttaccgcgatcagaaaaagaatcagtaaaatactgtttaacataatctatccgtgtcgtaccgacgattcagtcggcgatcgtaaggaagggtcatacataaaagttaaaatggcgggcaggaaagccgccattgggctgtgtcaacagcccggatagtatagcagcagcaatcagatgcccgctagcccctacaaattcggtggcaggcaaaccccaatgccccctaaaccacagtagccgtgaggatttttatacagatactgctggtgatcgtcttccgcataatagaaaggcaacgccgcagtaatctcactggtaatgatgcgcttatcaccggcgtctgccatcgcttgctggaatcgggcgcggctggcgttagcctgctgttcctgttccggggtcaatacgtagatagccgagcgatactgagtaccgatgtcgccgccctgacgcattccttgagccgggtcgtggttttcccagaaaatctgtagtaactggtcgtagccaatcactttgggatcaaacaccactcgcaccacttcggcgtggccggtgcggccgctgcaaacttcatgataagtcggatttggtgtatagcctccgctgtagcctgcggcggtgctataaacccccggttgttgccagaacaggcgctctacgccccaaaaacagcccatggcaaaaatcgcttctttcataccttctggaatatgagtcatcgagtggccatttacggcgtgagtagttgcaaccggcatcggggtggtgcgtcccggcagggcatcttgtgcgttaataacggctgatttttctgaattgtgcagcaaaatgaactccggttatcacagtgttaaaggatagatagttgtatctgattgcgagtttgcacacaataagaggcatattgcgttaatgtatcagcttaacgcagaatcttaggggcgacaggcttaaatcggtcttcataaagggaaatatggtgtgaaaacaccgtcatatatccgttagccggtgagatcgtttttttacaggaaagtaaaaattaatcaggagtacgcgtgtctcgataccctattgtgtgttttttgtgtgcattactcgcaacaccgtttgcttatgccgccaatgttcggctgcaggttgaaggtcttagcggggatttggaaagaaacgttcgggcgcgattatcaactatcggcaccgatgaagtcagcgccgatggccggttccgtgccagggtggacgaagcaatccgtcagggacttagagcgcttggctattacgatcccatcattgaatttgatttacagcccaagcctgcaccggcgcgttcaatattaatggtgaaggtcactccgggtgaaccggtattaatagccagcgttgatatcgtattacaaggcggtgcgaaaaccgatccttcctatctggctctggtacgccgggacacgccaaaaatcggttcaattctgaaccacggcgaattcgatagcttcaaaggttcgctgactaatctggcgttacgccggggttattttgacgctaacatgatcaaaagtcagttaggcgtagcggctgaattacggaaagccttttgggatatcgattttgacagcggcgaacgttatcgtttcggtacggtgagttttcagggttcacaaattcgcgaagattacctgcaaaatttggttcctttccacgcagggcaagattacagctcggacgatttagccgaactcaaccgccgtttagcggccaccaactggtttaactccgtggtggtttctcctgattttcgcgatgcgaagaaaagtaaaacattgccattagacgccgtgctgacgccccgcacggaaaataccgttgagctaggcggtggttttgccagcgatatcggcccaagggtaaaagccagttggcgtaaaccctgggtgaataatcgtggccacagttttacgacgagcgccaacgtttcggcccctgagcaaagtcttgattttagctaccgcattcctttgctgaaaaatccacttgagcaatattatctgcttcagggcggtttcaaacgtaccgatctgaatgacaccaaatctgacaccaccacgctgaatgtggcgcgtttctgggatatgtccagcggctggcagcgttctatcaatctgcgctggagtctggaccactttacgcagggtaacgttacggataccactatgctgctgtatccgggcgccagtgtgaatcgcacccgtcagcgcggcggcgcgatgccgtcgtggggagacagccagcgttactcggtggacgtttctgataccacctggggttccgacgtcgattttgccgtgttccaggcgcaaaacgtgtggattcgtacattaggtgagaaaaaccgcttcgttgcgcgaggaaatctcggttggatcgaaaccaataactttaatcgagtccctccatctctgcgtttcttcgccggtggcgatcgcagcgtgcggggttataaatatcaaagcatttcaccgctggatagttccggtaaattgagcggcgcatccaagttggctactggctccatcgaatatcaatataacgtcactggaaaatggtggggtgccgtatttatcgattcgggtgaagctgtgaacgatatccgtaagagcgattttaaaaccggcgcgggtgttggcgtgcgctgggaatccccggttggaccgattaaatttgaccttgcagcgccggttggcgatcaagaaacccacggagtccaattctatattggtttggggcctgaactatgaattggctaaagaaactcagtatcgcatttttactcattttgctgttgctgatcggcactgtggccggtttgctcggcaccactaccggtttgcactttctgatcaacagcgcggcgcgttgggtgccggggctggatattgccagtgtcagcggcggctggcgggatctcacgctgaaaggcattcagtaccaaatgccgggcgtgacggtgaaagccggccagttccatctttccctgcagttatcttgtcttaaacgtagcgaactgtgtgttaacgctttgacggcgcaggatattgacgtggttgtcgatacaaaattgctgccgccttctgagcctgtgccgccggatagcgaacccatgggcgagctgagcacgccgtatccgatgactctgcggctgctggcgattaaccatgtcaaagtgaccatcgacgatacggcgatttcgctggacgagttccgcactggtgctcactggcaacaacgcgcgttaaccttgatgccgaccaaaattagcgggttgttgattgccttaccgaaaaccacgccagttgccgtgccggaagcaatgaaaccggcggtagacacggcgattgcagtcaaagaagccacggaaaaagcagcggagaaagtggctgattccgcgccaacgcaagatttagctcagtcctccgagcctgaaaaaccgctaggggaaacgttaaaagccctgttcgccaagccgttgctgccagagttgcctgattttcgtttgcctgtcgatttgcagattcaggaaatcaatgctcaacagctgcgtttgaccggcgataccgaagcattaatcactagcctgatattgaaagccagcacgcaagatcaaagggtgacgctggaaacgttggatattaaatccccgcagggtggcttgaccgccagcgggcaggctacgttggcagataaatggccgttggagttggtggtaaatagtgccgttaacgttgagccgctgaaaggcgagaaaatcaaactgaacctgggtggcggcctgcgggatcaactcactgtggcgctaaatttgtccggcccggtcagcgctcagcttgaagcacaaactgaactggctaaagccggtttacctctggctttgaccttacaaagcaagcagctgcgttggccttttaccggcgacgctcagttccaggtcaataacttcaaaacgcgctttaacggacaggcctcagattatgcgttgtctattcgcgcagacgtaaaaggggcggatattcctcccgccgtcattactttggacgggaaaggcaacgttgagcagtttaggctaacgcgtttgcggttggcggcactgcaaggaaataccgatctaactggcgtagccgactggagtcacgctattagctggaactcggttctgacgctaaacggcatcaatacggcgaagcagtggccggaatggccggcgaaactggacggcaagattgtcacccgcggcagtatgcacggcggcagctggcagcttaatgttccagagctgactttagacggtaacgtaaaacagaatcgcgtcacggccagaggctctctcaccggcaatgccgccggacaatggcatattccgggtatcaatctggcgttgggtcgcaataagctggatgtgaagggcgatctgaatgacaaatgggttctcgacgccaatgtggacgcgccgcagttagatggcgctctgccaggtttggctggcgtggttaaaggcaatctgaagctgcgcggcgatcttgcagcaccacagcttttggccgatctaaccgcgacggggttgcaatggcaagcactacatattcgccggattaaggtcgatggcgatgtgcgttctgctgagcagattcaggggcaactggcggtacgggttgagcaactgaagcaggacgacttattggtcagtctgttgacgctagatgccaaagggagcgaaaagcagcatcagctacgtttaaacgttcagggagagccggtttctggccagttggcgctggacggcagtttcgatcgtcaacagcagcgctggcgtggcaatctgaacaatacccgctttgacacgccagttggagaatggcgtttaaatcgcgctattgctctggattatctcaatacggcgcagaaaatcaccatcgggccgcactgctggcagaacccgaatgccgaactttgtgtgccacgtaccattgaagctgggccaagcgggcaagctagcatcgtgcttaatcgctttgatttggcgatgattaaacccttccttgggccggataccacgctaaacggcgtattcagcggtcgagcggacgtgagctgggcagaaggtggtgccttgcctcaggccaaggtttctttggtgggtaaaggggttaacgttaaacagatggttcaggggaatcctctgccgctggcctttgataccctgaatttgaacgcggcgctgaataatggccgggctcaggccgattggctaattaagctgacaaataacggccagtttaacggtcaggtgcaggtcgcggatccgcaagggcgcagaaatctctctggtaatattgctatcagtcatatttcgctggcgatgattaacccgattctcagcgacggcgagaaagccaaagggatgctgaacgccaacctgcgtcttggtggcaatgccaaaaatccactggtcttcgggcgtttggcgcttgaagacatggatattgacggtagctggatgccatttgatattactgatgggcgtctggccgtgaattttgatggcatgacctccactctggaagggttgattcgaaccacaaacgggcagcttaatcttgatgggagcgcggattggcgcaatatcgatgcatggcgtgcccgtatcgcggcgaaaggcaataagctgcgagtcactatcccaccaatggttcgcgttgatgtatcaccggatattgtgtttgaagctaccccgcagctgttctctcttaacggttctgtggatattccgtgggcgcgtataacggtacaagaagtgccggaaagcgcggttggcgtatctccggatgaagtgatgttgaataacaaccttcagcctatcgccccaagaagcgcgggtattccgattaacagtaatctgcttattcatgttggcaatgatgttcgtctgaacgcttttggcctgaaagcgcgcctgcaaggcgatctgaaaatggttcaggatcagcgcggtttggggttaaacggccaaattaatattccgtccggtagtttccgtgcctatgggcaggatctgatcgtgcggaaaggcctgctgttgttctccgggccgccggatcaaccgctgctgaatattgaagcgattcgtaacccagattctaccgaagatggcgtcaccgctggggttcgggttactgggctggcagatgcgccgcagcttgaggtgttctccgatccggtcaaatctcagcaagaggctttgtcatacttactgcgcggccagggtctgagcagttctggcaccgatagcagcatgatgacctcaatgctcatcggcatgggggtggcgcagagcggcaagctggtggggcaaatcggtgaggcgttcggcgtaagcgatctggcgttggatactcagggcgtaggagatagttcgcaagtggtcgttagcggatatgtcaccaaagacctacaggtaaaatatggtgtcggtatatttgactcattggcgacgttaacattacgctatcgattgatgcccaggttgtatctggaggcggtgtctggtattaatcaggcattagatgtgctctatcagtttgagttttaatgatgcgaattattgtctacggtagtttacggcgcaaacaaggtaacagtcactggatgactgacgctcagcttttgggtgaatatgaccttgatgggtatgaaatgtacaatttgggccattatcccgcggtcattcccggtgaaggtcaggtgcattgcgaggtttatcggataaactcagccatcatgaccgagctggatgaactgaagagtaataccaaagattataagcgtgagctaattcaaacgccttttggcagcgcctggatttatctctatcgcctgagtgttgcaggattgccgcggattcgaagcggtgactggctcaaacgccacgaagaacacgaagaaaagtgatttgaaagtaaaaaaacaccgctcattgagcggtgtttttttatggggcagcggcaagaattacttcttggccgcgcgctcgaaagaagcaacgatttcagctttcgctgctgctgcatcttcccaaccgtcaactttaacccatttgccggtttccagatctttgtagtgttcaaagaagtgtttgatctgcgctttcagcagctctggcagatcttgcacgtctttaacgtgatcgtattctttagtcagtttgctgtgcggaacggcaaccagcttggcatcttcgcccgcttcgtcagtcattttcaacacaccaactggacggcaacgaaccactgaacccggctgtaatgggtaaggcgttggaaccagaacgtcaaccgggtcaccgtctaaagacagggtgttgttgatgtagccgtagttgcacgggtagaacatggcggtagacatgaaacggtcaacgaacagagaaccggtttctttgtcgatttcgtatttaattggatcggcgttagctgggatttcgatcacaacgtaaatatcttctggcaggtctttacctgctggtactaagttcaagctcatgtcggtttccttttatcaaaccagaaatggagtgccggctattatagccaactcttttcttaattcccgtccttttcacatctggataatggaggtattagctaaatttggctgaacaagccgcgtagaaatctcgtcattgcctaatcgtatctattttcacctgttttactcgccatagctcaagaaggtatcgggtacgccgataacttatctaaataatatgcctgctcacttttagttaacgctttgtaatcttcattcttcgcagataaccgggaaaaaaagatgttaaaaaagattaccgtaaagaccgggttgatcgcccagttgagtttgatgtcgttgattttattagttgttagcgtaattggtatcaactccattcacgaaagctctaattctttgcggatcattaatcagattcagggagaggagctgggggcgttatccaatagttttaatgcgacgttaagtgccagagccgcggctgccttggctgtcaggcaaatggaaatcggcctgattgatgaatcccagaaaacggccaacaaaattgaagccgatttggcccaatctcagcaggaaatgaagcgctttattgcggcggtcactgccagaggggaaggggaagacctggcgaataatattcaaaaaagttataaattctatctcgagcaaggcgtgtttccgatgctggaagcgatcaaagcaggtaaggcggacgattactatgaagcgctggaaaaccggatttccagcatcagcggtgctttcgatggagatgtgcagcaattccgctcttatgcgctgaatgcaggccagcagcaaattgagcaagccaatagcgcggcacacattaaagttgccattattgtcgcttcggggctgataactttattttccgcgatagttgcctggtttgctttgcaaattattattctgcgtccgttggagcagtctattcatcaattggagtttattgcggccggagatctgacccatagtattaatggcgaaggtaaaaccgaactggcgcgcttggccatggctttacaggccatgcagcaatcgctggtggcttcagtgagccatgtccgggatgttggcggtcagattggtatcggatcgcgggagttagccgcaggtaatatccatctcgcgcaaagaaccgaagaatcagccgcttcgctggaacaaactgccgccagcatggagcaactgacttctacggtgaaaatgaacgcggagaattcagatcaagcaaaccgtttggctgtgagcgtctctgagatcgctaatcaggggagttcggtggttaatcatgtgatggataaaatgcaggcgatcaccaccagttcgcgaaggatttccgatattatcagcgtgatggatagcatagcgtttcagactaatattctggcgctgaatgcggcggtggaagcggcccgcgccggagaacagggacgaggttttgccgtcgtcgccggtgaagtccgtaatctggctcagcgaagcgcccagtcagccaaagaaatcaaagggttgattgtagaatcgcaaagtcgggtacgggaaggggctgatatggctgagtccgctggtaaaaccatgaatgatattgcccgcgaggtaagccgggtaacggcattaatgaaagaaatatccgctgcgtcccatgagcaaagctctggtattgagcaggttaatctggcgattacgcaaatggatcaggtagcgcagcagaacgcagcgttggttgaacaggcagcggcggcaacgcgctcgctagaagagcaggcggatgcgcttgctgccagcatggcggtgtttaagctgcagccggatgaagaaaccgtggcagcataaaaaacagcggccgtagccgctgcttgattcgatctatatggaataataattaatctgggaactgagcgataaaacgctctgcatcttccaccatagatttggtaccgacgaagaatggcgcacgttgatgcagcttctccggcacgatatccagaatacgattcacaccatcggtggctttaccgccggcttgttcagccaggaatgccattgggttgcattcgtacagcaaacgcagtttcccttgcggatggctggcggtacttggataaatatagatgccgcctttcaacaggttacggtggaagtctgcgaccagagaaccaatatagcgagaagtataaggacgctgggttgcatcatcctgctcctgacaatacttgatgtatttcttcacgccctgagggaatttgatgtagttcccttcgttgattgaatacatgcaaccggttgctggatagcgaactttctcatgggataaacagaaaacacccagcgatgggtcgtaggtaaatccgtgaacgccgtaaccggtagtgtagaccagcatggtggatgaaccgtagaccacgtagcctgccgcaacctgagcgctgcccggctgaaggaaatctttttctgtgacgggttcgccgattggcgtaatgcgacgatagatagagaaaatagtaccgaccgagacattcacatcaatattagaagagccgtctaatgggtccatcagaaccacatatttggcgttctctgctctctcaccttcgaaaataacgatgtcatcttcttcttcagacgcgatacccgcaacttcgccacgcgctttaagagcggctttcagcttctcattggcatacaaatccaatttcatctgaacttcaccctgcacattttcagcgccgctggtaccgagaatatcgaccagacctgctttattgatgtcgcggtgaatgattttagcgcctaacttgatagctgacagtaatgcagttaattcgcctgtggcgtgagagaagtcttgctgtttctcgacgataaattcgcctaacgttttcatgacacaatccctgaatctacggttgaacatcgaattactaacaaaccacttacaatatgctcgcagtgtagcccaaagctaagattgattcataggcaattccatttcttctctcggattctgagcggtagaatagccgcaaactcgatgcaatcagacggaaacatttatgcgcattcatattcttggtatttgcggcacgtttatgggggggctggcaatgctggcgcgctcattggggcatgaggtcactggggccgacgctaacgtttatccaccgatgagtaccttgttagagaaccaagggatcagtttgatccagggatacgatccggctcagctcgatcctgcaccggatctggtgatcatcggtaatgcgatgactcgcggcaatccttgtgtcgaagcagttttagaacgcggtattccttacgtttctggcccgcagtggctccacgatcaggttctgcctgagcgctgggttattgcggtcgcaggcactcacggtaaaaccaccaccgccggtatggtgacctggattctggaagcctgtggctatgagccaggctttgtgattggcggtgtaccgggtaattttgacgtttctgcccgtttaggtaacagcccattctttgtgatcgaagccgacgaatatgactgcgccttcttcgataaacgttccaaattcgttcattacagcccacgcacgctgatcatgaacaatctggaattcgatcacgcagatatctttgacgatcttaaagcgatccagaagcagttccatcatctggtgcgtttggtgcccgggaaaggcaagatcatcctgccagataacgacaaccacctgaaacaggtgatggcgatggggtgctggagtgagcaggaatttgtgggcgaaaccggcagttggtcagcgaagaaagtcacggtcgatgccagcgcttatcaggtattcctggataatgaactggttggcgaagtcaattggtcgctggtaggtgaacacaatatgcataacgggctgatggccattgctgccgctcggcacgtcggtgtacagccagccgacgcttgccgcgctctcggtgattttatcaatgctcgtcgccgtcttgagctacgtggcgaagccaacggcgtaacggtttatgatgattttgctcatcatccaacggccattctggctactttagctgcgctgcgtggcaaggttggcgggacagcgcggattttggcggtgctggaacctcgctcaaacaccatgaaaatggggctgtgcaaaaatgagctggcgccgtcactcggccgggctgatgaagtctttctgttccagccacagcatattccgtggcaggtggtggaagtggccgaagcctgtattcaaccggcttcatggagtgctgatattgatacgctggtagaaatgatcgcgaaaaccgctcagccgggcgatcacattctggtcatgagcaacggtggtttcggcggaatccatagcaaactgctggaagcgctggagaaaaaggcgcatcagcagctattgaactgatttagataaaaaaagcccccgaaagggggccaaagggttcgctggataggacagcgagggattatctagcattgctctttcttacttttttcttgctcttgctcaatagacttatgttcatctgtttatagttaaaagattattgagcaagcttgtctgtttgggatttgccgcttaaaacaccgtgcattcgcccttatttgtaaatcttggctgttgcatgccagccattttcctgacgcatttcaatgattttatacgctgtagcgcctttgctatcggctttgtcggccagtgcctgagtaatatcagaaggcgcgccggtgatgccactcacgctgatggttcccatatcggtcaggctgttagtttgagcattattaacagactcggcggctgaagcgccaaacgcgataacggaaaataagcctagtgcagcgatggtatttttgattttcatgatctcttcctaaaaatagccaacaaccagaaagcattattatcgattctgctacttagaggctgttgttttgattgtgtttctattctgactgaatctggtaaggcgatgcgccaggtcagaatttactggtagatttttgctgtagcgtggaagttgccgtcttcgcgagcttcgataacctgataagccttggcgccttgtgcatctgctttgtcagacagtgcctgacgaatatctgaaggcgtcccattcacaccgctaacagtaatggtgccaaccgattgtaagttagccgcttggcttgcgttgattgaatcggctgcaaatacgccaaatgacagtgcagaaagaacgcttaatgctgctacggtagttttaatgttcatgttatggcctcttaatattcttttattagtttgcgtaaatgtgatttacgtcacgaaatgagtatacatctagtcacccgaaacattaatagcgggctaataatatttagcgtgactttaatgtgagttattagtttttaataaccaaacggaataaaaatcgatcaaaaaatgagtgattgaggcaaaaaagtagatatttcaaatgagtgggtgtttttgaccaaaagtgcgaaaattttagcgtgtattcgctgtttaatgaaaaagggtcattttccgtgccggttagatgagaaaatccagtgatattcactacatgcagtatgcctcttgggaaatagctcagaggctagttatatctataggatgataacgagcaaaaaagcgaagctgcatggcttggaaaggatggctgatgcaaggtaaaggaagatgactaagggaataggctgtcgcagatcgaagatggcaaagggattgaaatgcagagtatgtactgtaaaaggccaatagaaccttgattctactggccgcgatctgattggctgggattacagctcttggtcgaataaacctaaaatggcgtcatgcagctgtttaacactaaagcctttagctggcgtggtgaaaattgtgtcatctccggcaatgctacccaggatgccttcggctttccctaatgaatctagcaggcgggcgataagctgagcagcaccagggctggtgtgaatcaccacgacagaatcattataatctacgtcgagaaccagatttttcagcgggctgctggtcgttggaactcccaattctgctggcagacagtaaaccatctccattttcgcattacgggttctaacggcaccaaacttggtcagcatgcgtgatactttggattggttaatgttttcaaacccttcctcctgcaatgccaaaacaatctcgccctgagaactgaatttttcctctttcaataacgctttaaacgctttgataaggtcttcttgttttgcgggatttcgcatttttcacctgggggaatggagagttaggaagccaattatgcatttaaatgaatttttattcaacattagcatgcgtaggaagtaataaaagctcttatatcaaagcagatgacaatttagcgtaaatatatctctaactattatgcctaagctaaatgcatagcaatcaaacagtcgtgataaaaatgttattaaaatgatgttgttctgatgttatggaagggtgtaatgtaaccgccgattaacctgttgtggatgcttaaattatttttagaagaatgtgcgctatatcattaatcgataagcgaattactctaaaataagccgacttcacacccgtttttaatgcgtgatctctcaatctgactgttaatagattgtgtttaaaatcgcaataaactaaggtgcgtaaatagatgaattcacggcaaatttaaattatatataacaaggagtataggatgaaagttgcagttctcggtgccgctggtggtatcggccaggccctcgctcttctactcaagactcagcttccttcaggttcagacctttctctgtacgacatcgctccggttactccgggtgtagctgtagatctgagccacatccctacggcagtcaatattaaaggttttagcggcgaagacgctaccccagctctgcaaggcgctgatgtagttctgatttctgccggtgtagcccgtaaacctggcatggatcgttcggatctatttaatgttaacgctgggatcgttcgtaatctggttgagcaaatcgctcgtacttgcccaaaagcattgatcggtattatcactaatccagtgaacaccaccgtagctatcgcggctgaagtactgaaaaaagctggggtatacgacaagaacaaactgtttggtatcaccactctggataccattcgttcaaacaccttcgttgctgaattgaaaggcaagcagcctcaggatatcgaagtgccggttattggtggtcactctggcgtgactattctgccattgctgtcacagattcctagcgtgagcttcaccgagcaggaagttgccgacctgaccaaacgtatccagaatgcgggtactgaagtcgttgaagcaaaagccggtggcgggtctgcaacgctgtctatgggccaggctgctgcgcgtttcggtctgtctctggttcgcgctctgcaaggtgaaagcggcattgttgaatgtgcatatgtggaaggcgatggcaaatatgctcgcttcttcgcgcagccaattctgcttggaaaacaaggtgttgctgaacgtaaagacattggcaaacttagtgcctttgagcaaaatgcattagaaagcatgctagacgtgctgcacaaagatatcgaactaggcgtagatttcgtcaacaaataacaattgttgattgaaaacagcggggggttattttcccttgactgtttcgtctaagaagccgctggtggcaagcaccggcggcttttttatgtcagtaagttatgactgtgctgaacgaatacgcgttttcctatccagtaaggcccctgttctagcgtcaaaatagcgggaaggccagatttccgagggatgaatctccagacattccgcaattagccactcacctttcggccagggacgagtcagggcattggctagcgttgatgagctaagaccggcatttcgagacaacgccgccagggttgttcctttcttccgcagtgccgcaataacgtcggcagggtgccaatcagatttccttaaaatcatctttaatccttttttttactaagctgctggcatgttagtggtataactaaccgtgtatcgttaatcatattacgaacgaaaagtaatcatttagaaacaggataacatcaaatttccaaatgattttcaaatattttctaaaaattccttttttgcgtgttaccgcatagtagagaagaaaggctatgaaaaaagagtggtttgctgccaaggaactgacaggtatcgcggggttgccctcgtctccacaaggaatcaacctcatggcaaaacgtgagggttggaaacaacggcgtcgccggggagttcagggtaaagcggttgaatatcatatagatagtttgccggtaagcgtgcttagtctgctacgactcaaagaggacccggtagattatgtcgtcacgcgacaggaaccgatagcggtatgggtagaggcctactatcagttaaccgaagcggagcgcgacaaaatcatcagttttattttgcgtgaagggattggttcgttaatgacgcgtttagccattacctgattaatgctgagcggggcatctattttattgcgctgttcggatgcccgaattgttgagtaaatccgagagtagatcatccatgaagaaacagtggttttcagccagggaattaacaggcatcgcaggattaccctcctcgccacaaggaatcaaccagatggccagacgcgaaggctgggaactacgccgccgacgtggagttcaaggtaaagctattgaatatcatgttgatagcttgcctgggcaagtgctggatatgataaggatgagggaggaacctgcggaatatatcgttgccagacaggaccctttgcaggtttggattgaagcttattaccagttgacggaggaagaacgcgatcaaattattgcgtttattttccgtgagggcgtcgcaacattaatggcgcgtttggttaatcgttagcgataaatcaggaaaacaacccagtcgttatttaacttccgggttgtttctttaagtttctcaaaaatctcgctgtacggctatatgcgctaaaccttccagcgctaatcgatgcggagtttctggcaatatctgcaatgcggcaattgccttgtcagcctcttcttccgcacgctgacgcgtataatccagagagccacattggcgcatggtttccagaacgggttccagcaaatggcgaccatttccttcttcaatcgctttgcggatcagggcagactgctcgggattcccgttattcatggcatgcagcagcggcaaagtcggtttaccttcatttaggtcgtcaccggtatttttaccgagagtggagccatcggagctgtaatctaacaaatcgtcgataagctggaatgcagtgccaagatagcggccataatcctgcagggcaatttcctgctctggggttgcgtcggcaagaatggcggaagattgagaggctgcttcaaacaggcgggccgttttactgtaaatcacccgcatatagctttcttcggtaatatctgggttattacaattcattaattgcagaacttcaccctcagcaatcacgttggtggcctctgacatcaattgcagcacgcgtagagaacccagactggtcatcatctggaaagagcgggtgtaaatgaaatcaccaaccagcacgctggcggcgttaccaaaggcggcattagccgtcgctttaccgcgacgcatatcggattcatcaacaacgtcatcgtgtaataatgttgcagtatgaataaattcaattaatgcggcgatagtgacatgtttatcgccctgataacccagcgctcgggcaaccagcaccgcaatcatggggcgaatacgtttcccgccaccgctgataatgtagtaacccaattgattgatgagcgttacatcggagttcaactggtcgagaattgttgcgttcacggccgccatatcctgcgcggttaactcgataatcttttctaggttcattgttttattcagctgtttttctctttaactacgatgacatcgccgctaacattattacatgacgttccctgagaccatgattgtacttgaaaaacgcgttaaataaatgacatgtaagaaactgcgctttttttcttcgtttgcagctattctgcgcttgtcatccgatccgtttttgcgtagaattcgcgccctaatatgaatatttatagtgcgctctggactacttaagtagggtgcacggaaagcggagttttatatgtacgcggttttccaaagtggtggtaaacaacaccgagtaagcgaaggtcaaaccgttcgcttggaaaagctggacatcgcaactggtgaaacaattgagtttgaccaagttctgatgatcgctaacggtgaagaaatcaatatcggcgctcctttagtcaatggcggtctggtcaaagctgaagtagttgctcacggtcgtggcgacaaaattaagattgttaaattccgtcgtcgtaagcactaccgtaagcagcaaggtcaccgtcagtggttcactgatgttaaaatcaccggtatcagcgcttaagttttaggagagcggacaaatggcacataaaaaggctggtggctcgactcgtaacggtcgtgactccgaaagtaaacgtctaggcgttaagcgttttggcggcgaagcagtattggcaggcagcatcatcgttcgtcaacgtggtactaaattccacgctggcatcaacgtaggttgcggtaaagaccacactctgtttgctttggctgacggtaaagtcaagttcgaagttaaaggcccgaaaaaccgtaaatttatcagcatcgaagctgaataagtttttcgcgtcctgctaatagatgtaagccctgcaattttgttgcggggctttttacatttctgggttgaccttacctgagtgaagtcatgaatacgaaacagcaggccggtttaggcattcttcttgcgttaacgactgccgtattctggggtattctgccgatagcaatgaagcaagtacttgaagtgatggacccttttaccatcgtctggtaccgctttacgcttgcgtctttgggcctgggattgattttggcctccagacggcaattgccttctctcacgttatttcgtcaacctcggtggttgttgttattggttattgccacctgcggtttgctggggaactttctctttttcagctcatcgctacagtatcttagcccgacggcgtctcaggttatcggacagttgtcaccggttgggatgatgatcgccagtgtgctgattttaaaagagcgcatgcgaattacgcaggttatcggcgcagcgatgctgatttgcggtttgatgctcttttttaacaccagcctgctggaaatctttaccagactgacggattacaccctcggcgtggcattaggcgtgtgcgccgctatggtttgggtgagctacggtgtcgctcagaaggtgctattaagacgcatggcatcgcaacagatcctcgtcttgttgtacactttatgtgcactggttctgtttccgctggccaaacccggcgttatttttcagttaagtggatggcaactggcgtgtctgctgttctgcggggttaacaccctggttggatacggagctttggctgaggccatggcgcgttggcaggcggcgcaggtaagcgctttagtgacgctgactccgttgtttacactgattttttcaaatttattagcgctggcgtggccagatatgtttgccgcacctcccctcaatgccgtgggctacgtaggggcgtttgtggtggtggcaggtgcaatgttttccgcaattggtcatcgatggtggccacggcggacagaaacaaccctggttgctccgttgaagcagcccggtgaatgatttacggagagagacatgaagtttgtagatgaagcggcgattctggttgtagccggtgatggtggtaacggttgtgtaagcttccgtcgtgaaaaatatattcctaacggcggcccggacggcggcgatggcggcgacggcggtgatatctacctgctggctgatgaaaacctgaataccctgatcgattaccgctttgtgaaatctttccgcgctgaacgtggacagaatggccagagccgtgattgtaccggtaaacgtggtaaagatattaccatcaaagtgccggtcggtacgcgtgtactggatcaggataccggtgaagttatcggtgatatgactcgtcacgggcagcgtctgatggttgccaaaggcgggttccacggtttgggtaactcccgtttcaaatcttcggttaaccgcgcaccgcgtcagaaaaccatgggtactgaaggggaaactcgcgaactgatgcttgagctattgctgctggctgatgtcggtatgctgggtctgccaaacgcaggtaaatctacctttatccgtgcggtatctgcggcaaaaccgaaagttgccgactatccatttaccaccttgatcccaagtctgggcgtggtgcgtatggatcatgagcaaagcttcgtcgttgccgacatccctggtttgattgaaggggcttcggaaggcgctggtttaggtattcgcttcctgaaacatttggaacgttgccgcgtactgttgcatctgatcgacatcgcacctattgatgaatccaatcctattgagaatgccaaaatcattatcaatgaattgcagcaatacagtgaaaatctggccgagaagccacgctggttggtatttaacaaggttgacctgttagaccaggctgaagcggaagaacgcgctaaggcgattgcagacgctctgggatgggaggataagtattatatgatctcggccgccaaccgcgaaggcgttaacgcgctgtgctgggacgttatgaacttcctgaatacccaacctaaagctatggcaattgctgagactgcccctgagaaagtcgagttcatgtgggatgattatcaccgtgaacagctggcagaagtggaagatgaagcgaaagacgaatgggatgacgattggaatgaagaagacgacgatggcgttgagttcatttacgagcgttaatctcagacatcagttttgagctaaaagaggctgcctgcgggcagcctttcgttttttgggcttattgctgatttggcaaccagcactgggcgttcaatccctgtcgatcgctgcggttctccagcgacagttttccctgatgcaactgtgcgattctcaatacgatattcagccccaatccgcttccaccatagcgttgatccatacggcgaaaagcctgcgtcagctcgccaatctggttctccttaatccctgggccttcgtccaaaacctgcaacagtacaccgctatcctgcgatgtcagtttaacgataatcaggctgtctgaggggctatagcggtgagcgttctccaccagattacgcagcattaaacgcagcagggcggcttcaccttgaatacaggaacgttctggtaaaatccattggagacgctgtttacgctgcgccgccatttcggccagttcttcccgcaacggttgcaccacatcctgaatccagtcaaaagtctgatattgtccgctggcaaaattctgccctgcgcgtgacagcatcaacagttgttcgatggtatgcatcaataaatcgaggcgattaattagcactttgctttccgctatgccatttttttccatcaattccagatgaaggcgaatgcccgccagcggtgtgcgtagttcgtgggcggcatcggcagtgaaacgacgttcttgctgaatggtattggaaaggcgggaaaacagctgatttagcgtgccggtaacggcgacgatttcctgcatatcacttttgataaccagcgggctaaggttgtccgcggagcgttcagaaagcttgctctgaagttgatccaacgggcgtatgatccaactgatagcccaaaaagaggcgaggagagtgatgatcatcataatcagagaaggggccagcagtgaagcgatggcctccgcaatttctgtgtcgactttttcatttctgactttggcggtgagagtttcatctactaaaaactgaatttgttcctggctctcatgccacagccacagcgcgctaattaactgagtgactaatagaatcagcgctagcatcagaatcagacgacgacgcatgctgatcatgataagacttccagacgataaccaatgccccgaaccgttcggattcgatctttacccaattttcttcgtagattatgaacgtgcacttcgagagtattcgagccaagatcgtcctgccaagtatagagatcttgctgtaacagctcccgattgacggtgtgcccggcgcgcataatcaggcgggaaagaatggcaaactccttcggcgtgatttccagcggctgttcctgtagataaacctgttgagttgccagattgaggctcaaattcccttgttgaagcaaattatcactttgcccctgatagcggcgaatcagagcacgcacgcgagccaataattctgccagcgcgaaaggtttaatcaaataatcatcagcgccagcatccagcccatcgacgcggtcttccaacgcatcgcgagctgttaatatcagcactggcaggctaatactctggcggcgccattggcggagcaacacggcaccatcctgatctggcaatcccagatcgagaataaccatgctgtactgactggtgataatcagaccgttggcttcagccgcggtactggcgcaatcgcaggcgtaaccctcactggtgagggccatggcaatgcctttttgtaacaactcatcatcttcgacaatcagtagtttcatggttttcagttattctgataaatatctttgtacaggcggctttcaaatcgaaccagcggcgcccggcggtttttttgatcttccggtggaacggcatagccagacaggaactggacaaacgccatgcgctgaccgctggcggtagtaataaagcctgccagattgtagaccccttgcagcgccccggttttggctgacactttgccatcaaccccggcttcgtgcagaccaccgcgatagcgcaatgtgccgtcataacccgataatggcagcatggagatgaagttaagttcttgatcgtgctgggcaatatattgcaatgcctgcatcatggtcgcaggagcaataagattatggcgcgataagcccgaaccatccaccacgatgctatttccgaggtcaactccagctttctgacgtaaaacctgacgtactgcgtcagcgccggctcgccaggtgcccggtacgccgaaacgctgatggccaatagttcggaaaactgtatcggcgatcatattgtcggattttttcagcatgatttttagcaagtcatgcaacggagcggattgtgcctgcgccaacacgctgccagccgcgctcggcgtagtttggcgtcttagattaccgtcaatctgaatatcggctttttttagctcgtctttcaaaatagcaccggcatagctagcgccgttttgcaccgcaaaggctaagggcaggggttcgctgcgttgagtcaggcagccggtaagggtaaagcggttgagttcgccgggaaccacatctagttcgcaatattgggcatccggcgagccttttgccagagtgcgaacttcgctaaacatttgtacgggatagtaagaagcgacgcgaataaaggccatatcgccgggattcggtgcgctgtacagcgataccgagaaacagttgcgatcgacaattgcggccgctggcggtgcgctgaagcactgggtcatatcgttccacggccagccgggcgctttatcatggctggcaaaaaccgaggtatcgataatcaaatccccggcaatttggcgtagacccgattttttcaacgttgttaccatatttcgcagttgctggcgggttaaggtcggatcgccatcgaaacgggcaatcagattaccgcgcagaacgccgtcagttatcggcgcatgactttccagcgtggtaacgaaacgaaaatcaggccctagctgcaacagggcggctagcgctgtcagtactttctgagtactggccgggagtgccatttgctgggcgtgatagtctatcaccggagttgtcgccccgattttttgcaccactaaagcaagattcgccccatcgggcagatactgcgtgtaattttctacctgcgccgcattggcattgaatacgctgatgttgatcgcaaaaacgcaggccaatttactgactattcgtgaaaaatgcataatttcggtataactgctgggtaacgtacagccatactacggtgcaacgagggcgaaagtaaacgatgaccctaaaggaactctacgttaaaatgtttatcaaaatgcaaaatcgatcctaacttggagttttagctccgggagggttttttttgttaatcgcctggaggcgggtaggattttaggctagccgtattttcattcgaaaacgtcaggatgacgattatttgaacaggatagatttagaggtatttaacagatgaaacagattccgatgacggtacgtggtgcagatcaactgcgcgaagagctcgaatatttgaagggcgtgcgtcgcccaaagattatcgctgatattgcggatgctcgcgaacacggcgatttaaaagaaaatgctgaataccatgcggctcgtgaacaacaggggttctgcgaaggccgtattcaggaaattgaagcgaagttatctaacgctcaggtgattgatatcaccaaaatgccgaataatgggcgggttattttcgcttctacggttacagtgttaaatctggacacggaagaagagcagacctaccgtattgttggtgatgatgaagcagattttaaacaaaatcttatttcagtaaattcaccgattgcccgcggcctcatcggtaaagaagttgatgatgtggtggttattcgtactccgggcggtgatgtagaattcgaaattcttaaagtcgaatatctgtaatacggctgatttgagcaataagtaagcagatatttgtaaagaaaagaaaaaaggccgcaagcggccttttatcagaactaagtgcatggcaccttttctttaaaacgaacgtcattaacgcggtaaaataatcttgcgctctttcgccgggcggtagagtactaaaatattaccgataatttgcacgttaactgcaccggtttcacgcacgatagcatcagcgatcaaggttttggtttcacgctcttcagcagtgatttttaccttgataagttcatgatgttccagtgtttgttcgatctcagccagcaccccttcggtcaagccgttattgcccagcatgactactggttttaacggatgggccaggcttttcaggtgctgtttttgtttgttattcagattcatcgtcttttttgcttaagttgggattgaaaacggttcattctaccgccatctcatgtgtatcaccaaatcggtcttttaccggttagggagtctacgcgagctaagcaatagatgcgcgggctcttaattaggatagttggaaaaagagatggccaataaaaagcgttcagctagctccagtcgctggttacaagaacactttagcgataaatatgtgattcaggcacagaaaaaagggttacgttcgcgcgcctggtttaaacttgatgaaatacaacagagcgataaactctttaaacccggtatgacagttgtggatttaggtgcagctccgggcggctggtctcagtatgtagttactcagatcggtggtaaaggtcgaatcatcgcttgcgatcttttaccaatggatcctatcgttggagtcgatttccttcaaggcgacttccgtgatgaaatggtgctgaaagcactgcttgagcgggtaggtgagaaaaaagttcaggtggttatgtctgacatggccccgaatatgagcggtactccggcagtcgatatccctaaatcgatgtatctggttgaattagcgctggatatgtgtcgtgatgtattggcaccaggcggaagtttcctggtgaaagtgttccagggagatggctttgatgaatacctacgggaaattcgctccctgtttacgaaagttaagattcgtaagccagacgcttctcgtgcgcgatcgcgagaagtgtacattgtagcgacagggcggaaactgtagtaccctaacgctgtttgttaacacagttgtaatatgaggttaatcccttgagtgacatggcgaaaaacctaattctctggttagttattgcagtcgtactgatgtctgtattccagagctttggtcccagcgaatcgaatggtcgtagagtggattactctactttcatctctgacgtatcccaagatcaggttcgtgaagcacgtatcaacgggcgtgaaattaatgttagcaagaaagataacagcaaatacacgacctttattccggttaatgacccgaaactgcttgataacctgttgactaaaaatgtgaaagttgttggtgagccaccggaagaaccgagcttgctggcttctatctttatctcctggttcccaatgttgttgttaattggggtctggatcttctttatgcgtcaaatgcagggcggcggcggcaaaggggcaatgtcctttggcaagagcaaggcgcgcatgttgactgaagatcagattaaaacctcttttgccgacgttgcaggctgtgacgaagcgaaagaagaagttagcgaactggttgaatacctgcgtgagccgagccgtttccagaagctgggcggtaaaattccgaaaggcgtattgatggtgggtcctccagggaccggtaaaaccttgctggcgaaagccattgcaggggaagctaaagtgccattctttactatttccggttctgacttcgtcgaaatgttcgttggtgtgggtgcatcccgcgttcgcgatatgttcgagcaagctaagaaagctgctccatgtatcatctttatcgatgaaattgatgcagtaggtcgccaacgtggcgcaggtttgggcggtggtcacgatgaacgtgagcaaaccctgaaccagatgctggttgagatggatggcttcgaaggtaatgaaggcatcatcgtgattgcggcaactaaccgtccagatgttctggatccagcattgctgcgtccgggtcgtttcgaccgtcaggttgtagttggtctgccagacgtgcgtggtcgtgaacagattctgaaagtccatatgcgtcgcgtaccgctggatatcgatatcgatgcgtcagtgattgcccgtggtactccaggcttctccggtgctgatttggctaacctggtcaacgaagctgcgttatttgccgctcgcggtaacaaacgcgttgtttcaatggtcgagtttgagaaagctaaagacaaaatcatgatgggtgcggaacgtcgctccatggtgatgaccgaagcgcagaaggaatctacggcatatcacgaagctggccatgcgattatcggtcgcttagtgccggagcacgatccggtgcataaagtgacaattattcctcgtggccgtgcgttgggtgtgactttcttcctgccggagggcgatgcaatcagcgctagccgtcagaaactggaaagccagatttctacgttgtacggcggtcgtcttgctgaagaaatcatttatggcccggaaaaagtgtctaccggtgcttcaaatgacattaaagtagctacctcaattgcacgtaacatggttacgcaatggggcttctcagaaaaactgggtccgctgctttatgctgaagaagaaggcgaagtgttcctcggtcgctcagtggcaaaagctaagcatatgtccgatgaaaccgcgcgtatcatcgatcaggaagtgaaattgctggttgagcgtaactatcagcgtgcacgtaagttgctgatggaaaacatggatgttcttcattccatgaaagacgcgctgatgaaatatgaaactattgatgcgccgcaaattgatgatttgatgaatcgtaaagaagttcgcccgccggctggctgggacgacgctacgaagaataaatcatctgatagtgacaatacgcctcaggcaccaacgcctgttgacgaaccgcgtaccccaactcctggcaacaccatgtcagaacagttaggtgataagtaagcggattgttggcatctaaatgcgtagtgattaatataaccccgggcttgctcggggtttttctttttctggccgggataaattgaagtgcttaaccatttttaaggtaaataacgatgtatttgactgccagggatctgactcttgatctctcacaccctcaggttatggggattttgaacgtcacccccgattcgttttccgatggcggacgccacaacgatctcgataatgcccttcatcacgcgcaggcaatgattgccgcaggtgcaactctgattgatgtgggcggcgagtctacccggcctggagccgctgaaattagcgagcaggaagaattggatcgagtgattccggtcgttgaagcgttggcgaaacgttttgagatctttatttcggttgatacttcaaaagcggcagtgataaccgaatcagccaaagtcggcgcgcatctgatcaatgacgttcgttctttgcaagagccgggcgctctggatgccgcggccgcgacgggcctgcctgtctgcctgatgcatatgcaagggcaaccgcagagcatgcagcaatcccctcactacgatgatttactggcggatgtgaaccagttttttgaacatcacattgaacgttgtgttgcggcaggtatcgcaaaaagtaaattgttactcgatccgggattcggttttggtaaaaatttagcgcataattaccagttattggctcggttggcagaacttcaccattttgagcttccgcttttggtcggaatgtcgcgaaaatctatggtgggtcagttacttaatgtaccacctcaacagcgagttattggcagcgttgcctgtgcagtcattgcggcaatgcagggcgcgcagatcgtcagagtgcatgatgttaaagaaaccgtcgaggcgatgcgtatcgtcgaggcaacactttcagcgaaggaatagagagaaattatgagtgaccgtaaatactttggtacagatggcattcgcggaaaagtaggtgacaacccgattacgcctgagtttgtattgaagctcggttgggccgcagggaaggttctggctcgtcatggctcgcgcaagatcatcattggtaaagatacgcgtatttccggttacatgctggaatcagcgttggaggccggtctggctgccgctggtttatctgcgtcattcactggcccaatgccaactcctgctgtggcttacctgactcgcgctttccgagcggaagcgggcatcgttatttccgcctctcataatcctttctatgacaacggcattaaattcttcgatattgatggtgcaaaactgcctgacgaagtagaagaagccattgaagcggagatggaaaagccactgacttgcgttgagtcatcagaattgggtaaagccagccgtattgttgatgcagccggccgttatatcgaattttgtaaaggtaccttcccgaacgaattaaatctgaacggtttgaaaatcgttgtggactgtgccaacggtgcaacctatcacattgcgccaagcgtattacgtgaactgggcgctaccgtgattgccataggctgtgagcctgacggtatgaacatcaatgaagaatgtggtgctaccgatgttcgtatgctgcaagagcgcgtattggctgaaaaagcacacgttggtctggcctttgacggcgacggcgaccgcctaatgatggttgaccatttgggcaataaagtggatggcgaccagattctttatattattgcgcgtgaaggcctgcgtcagggtcagctgaaaggtggcgctgttggtacgctgatgagcaatatgggtctggagctagcgctgaagcaactcggcattcctttcgctcgcgcaaaagtgggcgaccgctacgtgttggaaaaaatgcaggaaaacggctggcgtatcggggctgaaaactccggccatgtgattctattggataaaaccaccaccggtgacggtatcgtagcaggtttgcaagtgctaactgcgatggtgcgtaacgacatgagcctgcatgatctgtgcagcggcatgaagttattgcctcagatactggttaacgttcgtttctccggtaatcacaatccgctagagtccgaagccgttgttgccgtgactcagcaggtcgaggctgaactggcggggcgtggccgcgtgctgttacgtaaatctggcactgaaccattgatacgcgtaatggttgaaggcgatgaagaggaagagctaattaagtctctggctcatcgtattgccgatgcggtaaaagcagcaggttaatggctttattttaggggggaggacgccgctcttccccgtagaattgtccgcaagttgagtaacctggctgttttttctgcaaatgagcccggttaatgaaattgcccttgcgtgtattaaccgctttggttagtattcacacccgcttaagtgggtgaatgaattcccgctgttatgggtgaaaagcatttggcatgcggtgaacccgcaaggatacaggtacaactatgtacgaagctcttctggtaattttcttgctgatttcgatcgggcttgtggctctgatcatgttgcagcaaggtaaaggcgcggatatgggagcctcattcggagcaggtgcttctgccactctgttcggttcgaatggttccggtaacttcatgacccgtatgacggctgtcttggcgactttatttttcgtcatcagtctgattttgggcaatatgagcaccaaccagggccgtaaaggcagcgagtgggaaaacctgggtcagccagttaaagctgagcagactacagcgccggtagcaccagctaagccgagcagcgatatcccgcagtaagaaatagtaagttgttgtaacgtcgtaagatagtacagaaagaaagttgaagaatggttgtggcgcttggacagtaaagcagaccattaatatcagtgccgtggtggtggaattggtagacacgctaccttgaggtggtagtgcccgattgggcttacgggttcaagtcccgtcctcggtaccaaacagatagataacttgcttttttatcgttatcgacgtagtatttgccacgttttcggacgcggggtggagcagcctggtagctcgtcgggctcataacccgaaggtcgtcggttcaaatccggcccccgcaaccactttcctaaagtgttttttttcaaatagtagtattcgcagtcctcaatactttcgatttcaatttgaaaaaaatacttgtcagaaagttgtaccgaagccgcttagcggcaaacagggtccagttgcataaagccccgaatttcggggttttttgttatttgacagcagaatcactgggctattaagccctttttttatgtcttgggggtgggcttgtccacattagaacaaaagttaacagagattatttcagcaccggtcgaagcgttaggctacgaattagtcggcatcgagttcatccgggggcgccaatcgacgctacgaatctatattgatagtgacgatggtatcactgttgatgcttgtgctgatgtcagccaccaggtcagcgctgtattggacgtagaagatccaatcacagtcgcttacaacttggaagtttcctctccgggccttgatcgccctatgttcaccgccgaacactatagtcgttaccttggtgaaacagtcatcctggttttgcgtatggcaatgcaaaaccgccggaaatggcagggtattattaaagctgttgatggtgaaatgatcacggttactgtggatggaaaagatgaagtgttcgcgctgagcaacatccagaaagcgaacctggtaccccacttttaaagtttggatgaggcaactaggatgaacaaagagattctggctgttgtagaagcagtttccaatgagaaatcccttccgcgcgagaagatttttgaagcgttggaaaccgctctagcgacagcgaccaagaaaaaatacgaacaagaaattgaagtccgtgtcagcatcgatcgtaaaaccggcgatttcgacaccttccgtcgttgggtcgctgttgatgaagtgacgatgccaacgcgtgaaatcacgctggaagccgctcaatatgaagacccaagcattcagttgggcgattatgtcgaagatcagattgaatccgtaactttcgaccgcattactacgcaaaccgcgaagcaggttatcgtacaaaaagtacgtgaagctgagcgtgcgatggtggtcgagcaattccgtcagtatttaggcgagattgtcacgggtacagtgaaaaaagttaaccgcgatagtatcgcgctggacttgggtaacaacgctgaagcggtgattggccgtgaagatatgttgccacgtgaaaacttccgtccgggcgaccgcatccgtggtgttctgtacgacgtgcgtcctgaagctcgcggcgcgcagctgtttgtcagccgctcccgttcagaaatgctgattgaattgttccgtattgaagtaccagaaattggtgaagagttgatcgaaattaaagccgcagcccgtgatccgggttctcgtgctaagattgcggtcaaaaccaacgataagcgtatcgatcctgtgggtgcctgtgtaggtatgcgcggtgcgcgagttcaggccgtttccagcgagcttggcggcgagcgtatcgatatcgtgttgtgggatgataatccggctcagtttgttatcaatgccatggctccggctgatgttgcgtcaatcgttgttgatgaagaccgacacacgatggatgtcgctgttgaagccagcaatctggctcaggcgattggccgtaacggtcaaaacgtccgtttggcttcacagcttagcggctgggagctgaacgtgatgacagcagatgatcttcaggcgaaacatcaggctgaagctcatgcggcgatcgataccttcaccaaacatcttgatattgatgaagatttcgccactgtgttggttgaagaaggtttctcttctctggaagagttggcttatgtgccaatcaacgaactgttggaaatagatggccttgatgaagatatggtagaagcgctgcgtgagcgcgctaaagctgcattgaccacgctggccctggcacaagaagaaagtcttggcgatcaaaaacccgcagatgacctactgaatttggaaggtctggaacgtagcatggcatttaaattggctgcgcgcggtgtgtgtacgctggaagatcttgccgagcagggtatcgacgatctggcagatattgaagggttgagcgatgagcaagccggcgagctgattatggccgcacgtaatatctgttggtttggcgataatgcgtaataaactgtagcaggaaggaacagcatgacagatgtaaccgttaaatcgctggcagcagagattcagaccccggttgatcgcctggtacagcagtttgctgatgcagggatcaagaagtctgaagtagactccgttacccagcaagaaaaagaaacattgctggcgcacctgaaccgtgaacacggcagcgcgccaaataaactcacgttgcaacgcaaaacgcgtagcaccttgaatattccgagcaccggcggaaaaagtaaatcggtgcaaatcgaggtccgcaagaaacgcacttatgtaaatacgccggaagctgaacaagcgaaagcggaagagcaggcacagcgtgaagcggaagagcaggcacaacgtgaagcagcagcggcagcgcagaaaatcgctgaagaaaatgctaaacgtgcggccgaagaacaagccaaacgtgaggccgctgaaaaagctaaacgccaagcagcggaaaaagaaaaagtgacgaatcaacaaaccgacgaaaaaaccaagccagctcagaccgataaagcacgccgtgaagctgaagctgccgagctgaaacgctctgtagaagaagaaacacgccgtaaggtcgaagaagacgcgaaacgcgttgctgaagaggcccgtaaaatggcggctgaaaacgaaggtaaatggccagaacctgtggctgagcagaccgagtctgctgactaccatgtaacgacctctcaacatgctcgcgccgcagaagatgaaaacgacgcgaaagttgaaggcgatcgccgtagccgcactcgtggtggcaaagcgactaaacagaaaaaaggcaataaactttccgagtctaaagccgatcgcgaagaagcgcgtgccgttggccgtaagggtaaacgtaagccaagcactttgcagcagagcttcaacaagccagtggttgcggtaaaccgtgacgtagtgattggcgaaactgttaccgttgccgaactggctaacaaaatggctgttaaaggttctcaggtcatcaaagcgatgatgaaactgggtgcaatggcaaccatcaaccaggttatcgatcaggaaacagctcagctggttgctgaagagatgggccacaaagttatcctgcgtcgtgaaaacgagctggaagaagcgctgatgagcgaccgtgatacaggtactggtattgcagctgagtcacgcgctccagttgtcaccatcatgggccacgttgaccacggtaaaacctctctgctggactacatccgctccactaaagtggcgtcgggcgaagcaggcggcattactcagcacatcggtgcttatcacgttgaaactgacaacggcatgatcaccttcctggataccccaggacacgcagcgtttacttcaatgcgtgctcgtggtgctcaggcgacagatatcgttgttctggttgttgcggcagacgatggcgtgatgccacagactatcgaagctatccagcatgcgaaagcggcgaacgtgccggttgtcgttgcagtgaacaaaatggataagccagaagccgatccagaccgcgttaaaaccgaactgtctcagtacggcatccagccggaagagtggggcggcgagtctcagttcatcaacgtgtctgctaaagcgggtacaggtattgacgaactgttgaacgcaatcctgctgcaagctgaagtgctggaactgaaagcggttcgtagcggcatggcaagcggtgtggttatcgaatccttcctggataaaggccgtggcccagttgctaccgtgctggttcaagaaggaacgctgaacaagggcgatatcgtactgtgtggcttcgagtatggccgtgtgcgtgcgatgcgtgacgaattaggtcgcgacatcacctccgctggtccgtctattccggttgaaattctgggtctgtccagcgttcctgctgccggtgacgaagttaccgttgttcgtgatgagaaaaaagcgcgtgaagttgcactgtatcgtcagggtaaattccgcgaagttaaactggctcgtcagcagaaatctaaactggaaaacatgtttgcgaacatgaccgaaggcgaagtttctgaactgaacatcgtaatcaagtctgacgtacagggttcttgtgaagctatctgtgattcactggaaaaactgtctaccgacgaagtgaaagtgcgcattgtgggttcaggcgttggtggtatcaccgaaactgatgcaactctggccgctgcttctggcgcaatcattcttggctttaacgtccgtgctgatgcttcagcccgtcgcgtagttgagactgaaggcctggatctgcgttactactccgttatctatagcctgattgacgaagtcaagcaggcaatgagcggtatgttggcaccagagtacaaacagcaaatcattggtctggctgaagttcgtgatgtatttaaatcaccgaaattcggcgccattgctggttgtatggttaccgaaggtgtgattaagcgtaacaacccaatccgcgttctgcgtgacaacgtggttatctacgaaggcgagctggaatctctgcgccgcttcaaagatgacgtaaacgaagtccgtaacggtatggaatgtggtatcggcgttaagaactacaacgacgtgcgtactggcgatatgatcgaagtattcgaaatcattgaaatcaaacgtaccatcgcttaacgacctctgatctgcttatatccatttggggggccttggcccccctacttgtctggagaatcctaatggcaaaagaatttagccgctctcagcgcgtttctcaggaaatgcaaaaagagatcgcaatcattctacagcgtgaaatcaaagatcctcgtgtcggtatggcgacggtgtcgggtatcgaactttctcgcgatctggcctacgccaaggtttttgtcactttcctgaatgtattaaccgacaatgccgatcctgatacggtcaaaaacggtatcaaggcactgcaagacgcttccggttatatccgtactttgctgggtaaagccatgcgtttgcgcattgtgcccgagctgacatttgcctatgacaactccctgattgaagggatgcgtatgtctaacctggtcacaaacgtcatcaaaaatgacgttgagcgtcagacctctacaggcactgacgaggagaagtaatgggtcgaccacgtcgtcgtggccgtgacattaacggtgttctgttattggacaaaccgttaggcctctcatcaaatgacgttttgcagaaagtgaagcgtcttttcagtgctaaccgtgcaggtcataccggtgcattggacccattagctaccggtatgctgcctatctgtctgggcgaagcgaccaagttttctcaattcctgctggattctgataaacgctaccgcgtgattgcccgtctgggccaacgtaccgatacctctgatgcagagggtgcgttgattagcgagcgtgacgtcaatttcactcaggaacagctggacgccgcgttggatagtttccgcggtgacacccagcaagtgccttccatgtattctgcgctgaaacatcagggcaaaccgctgtacgagtatgctcgtcagggaatcgaagtggagcgagaagcccgtgatatcacggtctatgagctgcaattcattcgttgggaaggttatgagctggagctggaaattcattgctcaaaaggtacctacattcgcaccatcattgatgatttgggcgaaatgttaggctgcggtgcccatgtcagctatctgcgtcgtttgcaggttgcaacttatccgagcgatcggatggtgacactggagcaactaagcgccatggttgaaacggctcaggccgaagagcgttcacctaacccggaactggataaactgttgctcccaatggatagcgcagtgttgaatttcccggaagtgaatttgctgccaatcgttgcagcttatgtgaaacagggtcaaccggttcaggtggcgggtgcgccaactgaaggcatggtccgcatgaccgaaggcgaagagcgcaatttcatcggcatcggtattattgctgatgatggcagagtcgcaccgaaacgtttggttgtggaacacgtagaataggcgcaatcggcctatcttgcgatcccacacatcaaagagtagaatagtccggcttacatattgggttgctgaattagagatcggcgcctgtctaatttaatctattatttggagttgtattatgtctctaagtgttgaagcgaaagctaaaattgttgctgacttcggtcgtggtgctaacgacaccggttctagcgaagttcaggttgctctgttgactgcacaaattaaccatttgcaaagtcacttctccgagcacaaaaaagatcaccacagccgtcgtggtctgctgcgtatggtatccacgcgtcgtaagctgctggactacctgaagcgtgaagatgtagcgcgttatgcttccctgatcgagcgtctgggtctgcgtcgctaagtctgcgagtttcgagtagaaaggggcctaatttggcccctttcttctaagaaccgatgacagaaaacgttaacgtattgttattgtttctaaaataggatcttccgttacagcatttcgcgcggctaatgagagactttagctcaatggtgagttaagggttgtcattagtcgcgaggatgtagtgtgaagatcggtaagtaacaggtggatcaggtcgtcaatacgatcgagcgccgatcaagctaaaggatattattttgctgactccgattattcgtaagttccagtacggtcaacataccgtgaccattgaaaccggtatgatggctcgccaggcaactgctgccgttatggtaagcatggacgacaccgcagtattcgttactgttgttggccagaaaaaagccaagccaggccaaagcttcttcccactgaccgttaactatcaggagcgtacttacgctgctggtcgtatcccaggcagtttcttccgtcgtgaaggccgtccaagcgaaggcgaaaccctgacctctcgcctgattgaccgtccgattcgccctctgttcccagaaggctttctgaatgaagttcaggttatcgcgaccgttgtttccgttaacccacaggttaacccggacatcgttgctctgatcggtgcatctgcggctctgagcctgtcaggtattccattcaacggcccaatcggtgctgcacgcgttggttttatcaatgaccaatacgttctgaacccgacgaccgatgagctgaaagaaagtcgtctggatctggttgttgccggtacagctgccgcagtattgatggttgaatccgaagcagacatcctgagcgaagatcaaatgctgggcgcagtggtattcggtcacgaacaacaacaggttgtgattgaaaacatcaacgcactggttgctgaagcgggcaaacctaagtgggattggcagccagaagcggttaacgaagcgctgtatgcgcgcgttgctgaattggccagcgcacgtctgggcgatgcataccgtattaccgagaaacaagagcgttacactcaggttgatgcaatcaaagctgaagtgaccgaatctctgctggcggcagacgagactctggatgcttcagaaattcaggacatcctgggcagcgtagagaaagacgtggttcgtagccgtgttctgcgtggcgagccgcgtatcgatggccgcgaaaaagacatgatccgtggtctggacgttcgtactggcgtattgccacgtactcacggttcagcactgttcacccgtggcgaaactcaggcgctggtaaccgcgactctgggtaccgcacgtgacgcgcaaaatattgatgaactgatgggtgagcgtactgactcattcctgctacactataacttccctccttactctgttggtgaaacaggtatggttggttcacctaagcgtcgtgagattggccatggccgtctggcgaaacgcggtgtgttggccgttatgccaagcccgagcgaattcccctataccattcgtgtggtttctgaaatcaccgaatctaacggttcttcctcaatggcttccgtttgtggtgcttctctggccctgatggacgctggcgtgccaatcaaagccgccgttgcgggtatcgcaatgggtctggttaaagatgaagaaaactttgtggttctgtccgatatcttgggtgacgaagatcacttgggcgacatggacttcaaagtagcgggtagccgtgaaggtattaccgcgctgcaaatggatattaaaatcgaaggtattacccgcgaaatcatgcaggaagcactgagccaggccaagggtgcgcgtctgcacattctgggcgtaatggaacaggctatcagcacaccacgtggtgatatctccgagttcgctccacgtatctacaccatgaagatcaactctgacaaaatcaaagatgtgatcggtaaaggtggttctgtgattcgtgcgctgacggaagaaacaggtactaccatcgaaatcgaagatgatggcaccatcaagattgcagcaactgacggcgaaaaagcgaaacacgctattcgtcgcatcgaagaaatcactgctgaaatcgaagtgggtcgcatctacgctggtaaagtaactcgtatcgttgatttcggtgcgttcgttgctatcggtggcggtaaagaaggtttggttcatatttctcaaatcgctgacaagcgcgtagagaaagtgactgattacctgcaaatgggccaggaagtgccagttaaggtaatggaagttgaccgtcagggtcgtattcgcctgagcatcaaagaagcgactacgcctgatgcagaagctccagcgcctgaagcagcagagtaattaagtccgttttcaactccttgccaagaggcagggagttgttcttatctcgagggcaggacgctcttgtgttaaacaagcggatgaaaggacgtttatccaatgtttgtcttcgggagtaggaaatgaagcctttcttgcgctggtgttacgttgcgacagcactcatgctggcaggatgcagcaacaatgattggcgtaaggatgaggttttggctatcccgttgcagcctacgctgcagcaggaagtgattctagctcgcatggaacagatccttgcaagccgggcactaacggatgatgagcgcgcgcagcttttatatgagcgcggagtgctgtatgatagcctcgggctacgggcactagcgcgaaatgatttttcgcaagcgttagctattcgtcctgatatgccagaagtttttaactatctgggcatttatttaacgcaggcaggcaattttgatgctgcctatgaagcgtttgattctgtactagagcttgatccaacttacaattacgcgcgtttaaatcggggcatcgcactttattatggcggtcgcttcccgttagcgcaggatgatctgcaggcgttttatcaagacgatccaaatgatcccttccgttcgttatggctgtacctggtggaaaaagaaattgatcccaaggctgccgaagtagcgttgaaacaacgctatgaaaagtcgaacagagggcaatggggatggaatattgtcgaattctacttggggaatatcagcgaaaaaacgctgatggaacgcctcaaggcggatgcaacggataacacttcgctcgctgagcatctcagtgaaactgacttctatttaggtaaacattacctaagtctgggggacaaggacaccgcttcggcgctgttcaaactgacggtagctaacaacgttcataactttgttgagcaccgctatgcattgttggaattggcgcttttgggccaagaacaagacgacctatcggaatcggaccagcaatagctgacggacaactattagcctgatataccttggttttaaccaatgtttatcaccttcgcgggtgatggcctttttgttcgttttataatctaatttgagccggttcacacttttcaatgaaaatgactgaaaattttctcgacgagttatgtagactggctgccattattaatgaggcacgtgtacatgactactgagcttgaaacctcttttgctgatttggggctgtccgctcctattctttctgcccttactgatctgggctacgaaaaaccatctccaattcaattggaatgtattccacacctgctgaacggccgtgatgttctcggcatggcgcagaccggtagtggtaaaacagctgctttcgggcttccgctgttgcacaacattgacccaacgctgaaagcaccacaggtgctggtactggctccaactcgtgagctggcagttcaggttgcggaagcattatctagcttctctaaacatattagcggcgttaacgtggtggccctgtacggcggccagcgttatgacgttcaattacgcgctttgcgccaagggccacaagttgttgttggcaccccaggtcgtctgttagaccacctgaaacgcggtaccctgaacctgtccaacctgagcggtttagtgttggatgaagcagatgaaatgctgcgtatgggctttatcgaagacgtagagaccatcatggcgcagatcccggctgaacatcagaccgctctgttctctgcaactatgccagaagctattcgtcgtattacccgtcgcttcatgaaagagccacaggaagtacgcattcagtctagcaatactactcgtcctgacatcagtcagagctactggaaagtcggcggcggttaccgtaaaaacgaagcgttggtgcgtttcttggaatctgaagatttcgacgcggcaatcatcttcgtgcgtaccaaaaacgcaacgttggaagtggctgaaactctggagcgcagtggctacagcagtgcagcactgaacggcgatatgaaccagtccctgcgtgagcagactctggaacgtctgcgcgatggtcgtttggatatcctgattgcaactgacgtggctgctcgtggcctggacgttgagcgtatcagcctggttgtaaactatgatatccctatggattcagagtcttacgttcaccgtatcggccgtaccggtcgtgcaggtcgtgcgggccgtgcgttgctgttcgttgagaaccgtgaacgtcgtctgttgcagaacatcgaacgtacgatgaagctgaccattccagaagtgatgttaccaaatgcagaattactgggcgaacgtcgtctggctaaattcgcggctaaagttagccagcagctggaaagtagcgatctggacgtataccgtggtctgttgactaaactgcaaccagaagatgagttcgatatcgaaactctggccgctgcgctgctgaaaatggcacagggcgaacgtcctctgattctgccaccagagccagtacgtcgtccgcagcgtgagttcagcccgcgtgaagaccgtggcaacgatcgtggcgatcgccgtgagcgtcgtccggaaagccgtgacggtggcgagcgtcctgcgcgtcgcgaacgtcgtgacgttggcgagatggaactgtaccgcattgaagtgggccgtgatgatggtgttgaagttcgtcatatcgttggcgctattgctaacgaaggcgacatcagtagccgttatatcgggaatatcaagctgttcgcttcccactcaaccattgagctgccaaaaggcatgccgggcgatatgctgtctcatttcacccgtactcgtatcctgaacaagccgctgaacatgcagctgttgggtgatgcgcagcctcacgaacgtcgtgagcgtgctccaggtgctggcgcagagcgtcgtggcggtggtcgttcattcggcggcgaacgtcgtgaaggcggcaacggtgctccacgtcgttcattcggcggtgagcgtcgcgaaggcggcaatggcggcgaacgtcgtggcaaccgtgacgctcaacgtccagctgccgcaccacgtcgtgatgatgcagccgctccggcagcagcaccagcccgtcgtcgtttcggtgacgcataagtcataatcatctgaatgatgaaaacaaaaaccagccttagggctggttttttttatgtctgtaattaaaggattagcttaaatctgcgtggggttaagcatatcttgctgtaaaccggcgacaatttcgaaggaacgcaggcgagcctgatgatcaaaaatctgtccgttaatcatgatttcatccgcctgagtctcacgcagcaaagattgcagtccgtggcggactttactttcatcgccaattatcgataaccgtagcgcctgatccacgccaaactgttccgccggtgaacagatgctggacatatcctgcaccggaggaggaagttgccctggtgtgccacgacgtagattaacaaactgctgctgcatggaagtaaacaggaagcgagcatcctgtacgctatcggcagcgacgacgttaacgcaaacaatggcgtaaggctgcgaccattcggcagagggtttgaagttctcccgatagagtttcagtgcctgaagcagcatgtctggtgcaaagtgagaggcaaaagcgaaaggcaggcccatagcggcggccagctgagcgctgtacaagctagaaccgagtaaccatagcggaacatgcaagccttgtcccggaacggcctgcactgcttgctcgggctgtgcttcggcgaaataacgctgtaattcacgcacgtccgcagggaaattatcttcaccggacaaatggcggcgaagtgccatcatagtgcgctgatcgcttcccggtgctcggcccaaccccaaatctattcgattaggatacagagaggctagggtaccaaactgctcggcaatcactaacggagagtggtttggcagcatcacgccaccggagccaagacggatttttttggttccagaggcgatatagccaattaataccgaagtcgctgcgctggcaatgccagtcatattgtggtgttcagccagccagtagcgttgatatccccagtcttcagcgcgttgagccagatccaatgacgcatggaaagcatcgcgaggggtttttcccttggctatcggggaaagatccaaaacggaaagggggataaggcgtttatcagtcatagaatcgtccatcttaccttatgtcggttcgcttgaagggcgagcgcatgaattaacctgctgctgtgaaagctctggtaaatagcgggtgatttattaccagagctgggaatttacctttaaagcataaatgaaattgcttgcccacaaggggaaataaatgcttcgcctgattggggcctttgtctcatttttatccgaattttgttcaattaaagtgctgttgagtattttatttcggctttggctttctcgttggaataagatggtgaaagtggtagttgataatgctgaaatgctgcgttaagaagtgaacataaaatattttatgctgtttcaatggctgcgggctggttttattgtgacggtaacagcagaatgccgattaaccattaattaattatggttaatcatttttgataggcatcacaaatgttaccgtgattatcttcggtttcatctgcacttcaatgagttctttcagtctatcttattaataatcaattgattagaatgctgcgtcgataatgacagcataaagtagcagggacagcgctcagagggagatagatcttcagaataaccctcttgaggtagaattattttctattgaggccagcggaagacatggatgttaaaacaatattctctgtacgcaagcgtaatatagccaaaaaataaaaacacctgcctgtctgataacgcctattttcagggcgatgatcggataactgactctgtacattttaataacgataaaacctactaaccagagaataaaggcgagagctattatggaaacggcaagttctaataagagcatcattttaattgactctccggcggcacagcgtgcaaatatgtctgaaagccaatggcgtgaagcaattaaatttgatagtacagattttggctgggtcattatgagcatcgggatggctatcggagccgggattgtgtttttaccggttcaggtaggattgatggggctttgggtatttttgttatcatcaattattggttatcctgcgatgtatttatttcagcgtttatttattaatacgctggctgaatctccagagtgtaaagactatcccagtgtgattagcgggtatttaggaaaaaactggggaataatattaggtgcactgtattttattatgttggtgatctggatgtttgtttattccaccgccatcacgaatgatagtgcctcttatctgcaaacttttggcgtgacggaaggattattatccgataatccgttctatggtttggtgctgatttgtgtcttggtcgctatttcctcccgaggggaaaaactgctgtttaagttatccagctttatggtgataacaaaactgttagtggttgcggccttaggcgtctctatggttggcatgtggcatctttacaacgtaggcctactgccaccggtgggtttgctgatcaaaaatgccattatcactctgccattcactctgacttccattctgtttatccagacgctaagcccaatggttatttcttatcgggcaaaagaaaagtcgctggaagttgcacggcacaaagcgctcagagccatgaatatcgcattcggaattctattttgtaccgtatttttctatgcggtttcatttaccttagcaatggggcatgacgaagcggtaaaagcttacgagcaaaatatttctgctttggcaattgcagctaaatttttccctggtggctgggcaacggtcgttagcgttattttaaatatattcgccgtgatgaccgcattctttggcgtgtatttaggattccgcgaagcaactcagggcattgtgatgaatatattacgtcgcataatgcctgcggagaaaataaatcagaaatgggtgcaaaatggaattatggtctttgccgtattattggcatggggcgccattattttaaatgcgccagtattaagtttcacctctatttgtagcccgatatttggtctggttggttgtttgattcctgcctatctggtttataaagttccagcactgcataaatataaaggtgtgtctttgatgattattatcatcaccggcattttactgtgtatttcacctttcctggcgttttcataagttaacggcatctgatattacctgctgtaaaggttgaaggtattcattatgagtcactgtagtcattcagagttatgggatgaattcatccgcgcggtaaaacaggaagttcaacccgctatcggctgcaccgaacctgtttcgttggcattggccgcggctatagccgcatctcatttgtcaggagccatcgaacgtattgaagcacgtgtttcccccaatttgatgaagaacgggatgggcgttactgtgccgggaaccggcatggtcgggttaacaatagctgccgccgtgggggcgctggctggcgatgctcaggcgggtttggaagtgctgaagcacattagcgcggagaaactggcagccgcgaaagctatgctgtctcagggaagcgttcgggtcacgatgcaggaaagtaaatatatcctgttttccgaagcgacgttatatagcggtgatgaatgggtgactgccactattgccggtgggcatacgaggttggttaacattgtaagaaatggtgaagtactgtttgcattcggtgattctggccatgaaattcatgatgggaatgaacctacactgggttattgcttgaagcaggccgatgctcgttcagtttatcagttcgccacagaggttccatttgagcgtatcgcctttattctacaggcggcgcgactaaatggtgcgctgtctgatgaggggttgagcggcaattatggcctgcatattggtgcaacgctggctcgccagcggcagcgtggattactggcgcaagacttattgtcgaatattatgattcgcaccgctgccgcttcagatgcgcgcatgggcggggcaacgttgccggcgatgagtaattcaggatcgggaaatcaggggattgcggccactatgccggtcgtggtggtggcggagcatctgggagccagtgaggaacagctggcgcgggcgttgatgctatctcatctgatggcgatttatatccatagccagctcccgtcattgtcggctttgtgtgccgcaaccaccgcttctatgggggccgcggcgggaatggcatggctaattgaaccgggttatgacgctgtagctatggcgattagcagcatgatcggcgacattagcggcattatctgcgacggcgcggccaatagctgcgcgatgaaagtctcaaccagcgtaacggcagcttataaagcggtgcttatggcgttggatcacagcggcgtaaccggcaacgaaggcatagtcgcgggggatgtcgatagctccatttccaatctgtgcgctctggcttgtggcgcgatgaggcaaaccgatagccagattatcgatattatggctcataaggcatgtgtctgaaatcacgctaaattaggcaaaaaaatgggagaggcagaaatacctctccctgtttatttccaacttatcgaaccttaagaaaccagttccaaaccggctacccgacgccagtaaccattgcagtcggctttatccgtcagggtcagcggagccagacctttttcattggcacggaatttatcgatcatggtgagcgcttcggtactgtgtggcgataaacgcacgatatccaccaatccttgcatagaaattaggtcattacctaggttatagcagtaaccactttgcgtctgaatgccattgagaacaaatacttgctgattttcctgtgagagaatactgcgcccctgagggtacttgatgcagcaggtctcgcactcgtctttagctcgatcctcggaacgagcggtaaagcagcgagccgaataagctaacggcagatagccgtaagccagcacttctacttcgaatttattacggaatcccagctcatcacactgaatcagcatgttttccaaccagtctcgcgagagctctaccggcatacaccaacgcatcatgccctgacgatgtagaatacgcagggtataggcgttatagcagttgagcgcgtggcctgctacgaagggcagtcctcgctcagcggccatattcaccgtaccaaagtcattggcttctaacagaaaatcgccgttttctacataacgtttgagttcagtcagttctgaaggggcctgtagcaatgcaagggtagaaatcgctacctgctttccgctggaagcgacttgtttcgccagttccagccagtcgcctactttcatttcacgtcgtttggtacaaacgttttcaccaagataaataatatcggcactgctttcacaggctttctgatagaaagcctcaatatctgtttttggccagtaataaagcactgcgcccaatgagtatttcatgctttttccaccctactgccacttgcgatgataagcgcccagcgttgtttgggtgccttctgacatcgaacctagttgctccatccattcggtttttgctgcgaattttgccggttctttctgatagaggtcgatggcctgacgccagactttagcaacctggctgacgtaagccgggctacgttggcggccttcaattttgaccgaagcgatattggccgcgaaaagttccggcaacagctccagcgtattgaggctggtgggttcttccagcgcgtggtaacgctgcccgtcaaccaggtagcgacctttgcacaacgtggggtaaccggcgttttcatcgtcctgatagcggtcgatcagcacttcgttcaggcgggattccatgccctgcggcgtctgttgccagcgcacatagcgggccggagaacaggcaccgacggtattgggagattcaccggtaagataggaggaaaggtaacagcggccttcagccataatgcacaggctaccgaaagcaaaaacttccagcggcaccgggctggtgcgggaaagctgttttacctgatgcatagacagcactcgcggtaaaactacccttgctacatcaaagttgcgttggtaaaaacggatggcctcgtcgtttgtagccgaagcctgaaccgaaacgtggcgttccacctcgggatagcgctcggcggcatattccagcatcgccaaatctgccagtatcaacgcatctgcacccagttgagccgccatatcgacggcgcgttgccagcgggaaaaaccgtccggatgggcaaaagtgttgatggcaatgtgcagcttacgtttccggctgtgaacgtaattcaccgcctcttgcagctttttatcggtaaaattcagtccggcaaaatggcgggcgttagtatcatctttcaagccgatgtacacagcatcagcgccgttatccaccgcagcttttagcgcgggcaaattaccggcaggacaaagcagctccatagaaatttcctgaatgagtcagcggcaatacctcggcattaccagaggtagtaaataatcctcatccgtagatgatcgtggtgacatggataattttaacgaggagcaattttagttaacctgctgcagacatatcttgatttggggcagtttcttccgcattgctgatagtgttctgatatttagcaaagaaagcatcggtaatctggtgcagaatttattgatttagtccgcgtgggtcgtctatccgtgtggcaaaatagaaaccgatgaattcaaaggagtcagcctgtgttgggaaaactacgagcacaccttgtgcgccaagggcctgcgctgctgcgggccccgctgaaaattacgccttttgctgtgcagcgtcaggtactggaacaggtactaagctggcagttccgccaggcgcttgaagagggcgatctgaagtttcttgctggtcgctggctgaagattgaagtgcgggatctcgcattacaatggtttatgacagtggaaaacggtaggctggtggtgagccaacaggcggacgctgatgtcagcttcagtggtgatgccaacgatcttgtattgatcgctgcccgtaaagaagatccggacacgctgtttttccagcgtcgactgcgtattgaaggggataccgaattgggcctgtatgtaaaaaatttgatggatgccatcgagttggaatccatgccaacattgctacgagtgggtctgcaacaactggccgattttattgaagcagggcaacaagagggcgcggagcagacttcccgtgccgtggtatcgtgttgatccgtaccgagatcccagtagacgcaccggggatcgataaactgctgcgtgagtcttttcccagcgatggggaagcaaagctggtgcaacaactgcgtgaagacggtttactgacgctaggtatcgtcgcgaccgatgatgaaggtggcgtggtgggctatgcagcattcagcccggtagatattgaaggggaagatcgtcagtgggtcggtttgggtcctctggccgtgaaagaagatttacgttgtcaggggttgggcgaaaaactggtatatgaaggtttggacgcgctgaatgaattcggctattccgccgtggtggtactgggcgatccggcatactatcagcgttttggtttcaaacctgcggctgacgctcagctatattgccgttggccaggttgcgaagcggcatttcaggtttactcactggctcccgatgctttggatggagtcactggccaggtaaattacgccgaagcctttaatcagctgtaattattgctgatttttcaggtaacagtaaatctgctacacaagaaggctggtcgcgtaccagcctttctttttgcttttttgtcagctgtttcaggcgatattccagttttagcgcggtggagcgatcgcccgccacgcagtgaaaaaccaggttcaattctccttttcctcgcaaagatttagcgcctttacccgactgatgctgtgccagacggcgtgaaacatcggtagttataccggtatataaactgcctgcggcggtacgaatcagataaatagaccagatgctttccgacataacgctctctgttgaatgaggggcgggaatattatcgtcggaatcaggactgaagcacggtttttttatccggtatgaaaaaccggaggaaacaacgcggacggcaaagggcttgccgcccgtgaagctgctgcttatttggttttatctgccagagcaaagcgaggtgaaaccaggccgtagagcgtccagcccaggaaggtcacaatcgcgccccacatcatggcttcctgacctgagctatacagggcgtagaagctatacatggcaccgataaaggcaatgatattggctcgacgagccttagctgccggtacgttagcggctttttgaatgataaccaaagcagccatagacaaaatatatggaatgatgttggttacgaccgccagattgaccagcacattgaactgtttattcagcgatgggctgatagtcatcagagacaggacgctctgaataatgacgatggtcaacatgcctttgatcggcgcattggctttactcactttagagaagattttcgggaagaaaccttcgtccgcagaggatttgaatacctgtgcgatggtgaactgccagccgagtagggaacctacgcaggacataatcattagcgccataattattttacccacggcaggggtaaacatataggcaaatgccagaccgaaaggcgcagtggaattagccagatccatgtttggtacgataccggcaatcacgttggtcgaaataatgtagataaaggccgcgcctaaagtaccgcccagcacggcgataggaacattacgctcaggattttctaccgcatcggtattggcacaggcggattccagacccaggaaggcccatagagtcatggagatggatgaaccgatagcttcaaaggttgggaaaccgtgtgggttccaggaggcgacataggcatcggcgctaaaccaccaccaaccgataactgaaatacccagcacaggaatgataacgccccaaatggttacactactgatttggccggtaatgcgtgcgccgccaaagttagcgactgttgctaaccagaggacgccaatggtcgccagacagatccccagcgggctgagagtgctgcccagcaattcagtaccatagccaacggcagaaatagcgatggcgatattggcgatcagcaacgatgcaccgtaggtatagttcgccataaagttgccggatttaccaaaggcatattcggcgtagccgcccataccgccagatttacggctgaacatgccgcattgggcgaaagcataggccagcgccatggaacctacggcggtgacaagccaagatacgatagaaatggtgccgacttcggcgagtttagttggtagcataattatgccagaacccatcatgttaaccgccgtcagaatggttaactgtactacgcccatcttattattagatttactcatattattttctctttttatctttcagagactgcggagataaatatccccgcaggtttgagtgtcatttttggtgttgtataaataaaatatttattattttttcatcatgtagccgtaggcgcgattccagccgtcttcgtctacttgtaaatacacgccttgtaattctggtgcaaagccaggcaataaattgatgctttcttctaatgccaggaaataacgttgcgctgcgccaccccaaacttccccaggaacgacacacaatactcccggtgggtaaggaagcgcgccttctgcggcaatacgaccttctgctttacataatggaaccagctctacgttgccacgaacaaattcaatattggcatcttgcggattcatcataactttcgggaaatattgtttacggaacatttctttctgcaattgttttacgtcgtagctgacgtaaaggtcgtgcatttcctgacacaggcggccaatggtgtaacctttataacgggcttcattattgcgatagaccgttggtaatacgtcgcacaacaaagcatcttcttcaatgaaacgctcgaatcgggcgatttgcgcaaccagatgctgcatttttgccaggtcttctgcaggtgttaataagaacagaattgaattgaggtcacatttttctggcacaatgccattttcccgcaggaaattagccaaaatagtagctggaatacctgattgagtatattcaccagtattggtatcaattcctggcgtggttaataatagcttgcaagggtcaacaaaatattgggaagcttcatacccttcgaaagcatgccatttctcaccgggaataaagttaaagaaacgcaagtcttgcgccatggtttcagtgtcatattcttgccacggttttccgtctacgctaaccggaacgaaaggcttaatcatagaacaggtatttaacagcattttacgggcttcaatcccgtttttaacacattccaaccacatacggcggccgctttccccttcatgcattttcgcattgacatccagagcggcgaataatggatagaatgggctggtggatgcatgaagcataaaggcgttattaaagcgtttatgattacagtaacgatcctgacctttaatatgtttatcttttttatgaatttgcgacgtttgagagaagccagcctgttgtttatgtactgactgggtcacaataatacccggatcgttttcgttcagctccagtaataatggtgaacaatccttcatcattggaataaattgttcgtagccaacccaggcggagtcgaacagaatgtaatcgcataaatgaccaattttatcgacaacctgacgagcgttataaatggtgccgtcgtaagttcccaattgaataattgccaatcggaaaggacgaggtgcatcagcacggtcaggcgatacgctacgtatttgttcacgcaggtatttttcttcaaaacagtgggcatcgataccgccgataaagccaaacgggttacgagccgtttccagataaactggcgttgcgccagcttgaattaaggcaccgtgatggttagatttatggttattacggtcaaacagaaccagatcgccacgggccagaatcgcattggttgcgactttattagaggctgaagtcccgttaagaacgaaataggttttatcggcattaaatacttttgccgcgtgtttctgtgcatcgcaaggcgcgccttcatgaatcagcaaatcacctaatttgacatcagcgttacacatatctgaacggaaaattgtttcgccataaaaatcgaagaattggcgacctaccggatgtttgcggaagaattggccgccctgatgacccggacaggcgaaagtagaattacccatttcaacgtattttgttagtgtgttgaaaaatggtggtaatagctcattttcgtatttttcggcagcagattctaattgtttaccgtagaatccggtgttgtcaccgcacaattcaaatacgccattgagggaaggcaatacatcattatttagctcttcttcgcagcatacggcagcgaaaataggaatgttaaaccctaatttatgaatggaatcaataacgccattatttatatcttgaactgataaaaccaccgctgaaacatcggtaaaatcagtatgtaaaacatcaacaatttcccgctgggtttcaaaacaagagattgctgaagcacttgccgcaatatttaattttttcatttttgctctcttttatttagggtgtatcaacccgtccaacttgtaggtgcgttggatttcgtttcattaatttttttgtatagcaatccacatcaatgacgttgagacattaattatttgaaatgctaattttcgcctgcactgtttctcacctaaaaaataggcaaagaatttcttaagccattaaattacggcaaaagttcacatcacgaattaattggataagttaacgaacgatttattccgacagatgaaaaatgtaaatctgtaggttaagtaaatcgataattaagcatcatttttgaaacagacaatagttaaccgacgccaaatgcattcgcaattttcgcacaagctaaatattgtgtttatgacaatgacgatccaataagtacggatgtcatcgcaggagggatattatctgtaatggaaataagagaagttaaaatagctacgatgagccggcatcataagatgagttgtccgccttatatgcgccatcttcttgttgttattttccattttcgtaacgtctctttgtttttgaacaatgggttgatgcgggctattctagcgataacactcattcattccgtgatgtgcgtcacattttgttcggattttaaaatgtgttttgactaaatcatgaatatatttacttctttattcatctatttcggtttttatgcgtttttatgattattttcacgagagcgcagtaagttatatttaacatacctgacacatagaaatatcctaataggtttattaatagaattgagagcgcactcacccgtaaattgttttctatttgttaattctgattaattaaatcttaatcgagatttatcccgtttttatgcatataaatgcaaaatgggtttatataagaaatgatagctaaatcactattagatacaatttagttatgtctttctgctatttcatccaccggataacagaacaattagtcctgcctgaagggaaatcttgtctggctcatttcgcgttttgtgatcgggttcggttacactgcaatgataatacagaggagctcgcagtgaataatccagatgatttacaggtgattagccagtttttactgaagcagcatgtgttgacgctgtgcgcaagccacgcgggcgatatgtggtgtgccaactgtttttatgtttttgaaccgcagcaaatggcgttatttctaatgacggaaggccatactcgccacggtgaactgatgcagaaaaaccctcaggtggtcggcactattgctacgcagcctcgcagtgtagccttgattaagggagtgcagtaccgaggagagattagtttgctaagcggtgatgacgataagttggcgcgtcagcgttactgtcggcgctttcctatcgcaaaagtagcctctgcgccgatctggcggctaagtttgcaagatatcaaaatgacgaataataccttgggatttggcaaaaagttgtactgggtacgcgactccgcgtgaaccaccaaacatcttgctggcttatgccatagtgccatttatttcattcgcgtattgtcttcacgggagcgttgtctccatccaaatattatctttatccgaatcgtgttttcatttgggtattgtggtggaaaagtatccccgttgttctggcacgatgttttccctgcgcggtttcttcgatccggctattcttatcttattcatggggttaaggagatttaatcgtgaaggttttattattgggcgcgagcggtctggtcggtggggaactattaagattattgcggctagatgccagaattagccacatcattgctcctacgcgtaagcctttgtcggtaatgaataaattgactaatccacaggctgacgatatgagtactttgctgaaaaccttaagcgctccggtagatgcagttttttgctgtctgggtactacccgtaagcaggcggggactcaggcggcgtttcgcgcaatagattatcgtttagtggtagaaacgggggaaaccggcctgcgactgggtgcgcgccatttgttggtggtaagcgccatgggggccaatccgcattcctggctgctttacagcagaaccaaaggtgaagcggaacgagcgttgagtcagcaaggctggccgcaactcagcatattccggccttctatgctgaccggtaaacgcccggtaccgcgtctgaccgaacgtttgaccgcgccgctgtttgcagtgctaccgaagaaatggcgttcaatttccgcaaaaaatgtggcgcaggcgatgttgcagcaggcttttacggttgctcacagcggcaccgtgattatcgaatcggatgccatgcagccggcgggaaaaatttcggataaccgatctgcttcctagagtatgatcacctgattatcgtaggctgcggcaacgccggcgggcagcaagttattcatcagccagcaatccaactggtggctgacatgggtgagcagggtgtttaccgggagtaattgccggtggatctccaaggccatgctcacatcattatggttgcgtggagcattggtttgcggcggatgactgcaatccatcaccagaagatctaacggcagccgagccagaaaagcggtggtagactctggcagaccggcggtatcggtcagataggccagcgttcggcgcggactttggtagagataaccaaaggttggttttgagtggttgagcggcaggggcgttatctgtaaaccggcgatgtccagcggttgaaaaggagttaacggcggttggaaatccagtattccagagtgtttgaacaggtcgtcgcagccgtcggcatccggcgggccgtagacgggaattgggctggaatagccccaacgtaacggaaataacccctgaacgtgatccatgtgataatgtgtaagccaaaaacgctgaatttcgtccgcagaaaaacgctctcctaacgtcggtaaaccggcatcaataaaatgcgattctccctgataacgcagcatggcgctgcatggaccacgccgaaatctgggctgctgacaggcgcgctggcaggctgggcaatcgcagccgaatgccggaacctgctgtgctccgccggttcccagaagggttagctgcattttattttccactcataagctcctgcgaatgcgtatttaccaccagttgaatcagatttttcagccggtgtaaggtatcggttagcgaaccatcattatctagccgtacacaatgggcgggtaaacgttgctgataatgcgcagctcttgccagacgttgagcgatttgagcctcatcttcgcgcccacgctgtagtaaacgctgccgcagaattgccggagacaccgccaggcagaccggcagcagtcggtgcccatagcgtcgctgagcgtgggaaagatgcgcccttgagccattggctaccacatccagccctttttccagccacaggtctatttccgcgcctaaggcataatgatgctgatgtgcctgccagcttaaagcaaacagcccctgcgcctggcgctgcaagaattcctcctcgctcagtgcaatatgattttcagcaccggcatctgctgggcgagtgatatagcggtgcgctaccagaattttatgttgctggtctttgcgtagcgcggaaagcaggcaatccttgccagcgccggatggccccatcagatagattaagtgcgccatcagaacacccgaatgccttgacgccagacgttttgcacgtagacgtgttcgccctgatttctcgccaaaaccagatccgctcgcttaccttcttcaatgacgccgcgatcggttaatcctaatgcgcgagccggattgcaggtcaccaacgctaccgcctgtggcagagagaaatcgttgcttgcatcctgagcaatacggaaagcggcatccagcaaactggccggatagtaatcggaagagagtatatccaacacgcctaatgaggccagcttatgggcggcaacattgccggaatgcgagccgccgcgcacgatattgggcgcgcccatcagaacttgcataccgtgctgatgagaggctcgcgccgccgcttccgttgtgggaaattcggcaataacgctgcctagcgcctgagattcagcaacgtgctcggcggtggcatcatcgtggctggcgagagaaatattgcgctggcggcaatgggctgcaatggcactgcggtttggcgccgcccagcgagcagatagattgatttgttcttcttcaaactgcgccattttttcatcattaagatgatatttgccctgatagtattcccgatatttttcacgggaggcgaattgacgctgacccggcgaatgatccatcagggaaactaaagatagctcgggttgatccatcagtttttcaaataatggcagcgtggtgtggtgaggcaattcacagcgtaaatgaatgcgatgttctgcccgatttaaaccagcacgctgactattcaccaccgcattaatcattttctgtaaattctccagccgatgaccgccgtcgcgcacatcgcccacggccaccgcatccagcaccgtggtcataccgctggcaaccatgagcgcatcgtggctgctcatggcagaatgtgcgggccagtctacgttggggcgcggggtgaagaatttgtccagattatcggtatgtagctcgatcaacccaggtaatagccagccattgtcaccgtcaatggcttgaggcagttggctggggcgatcggtaaaactgcgaatcattccgtcctggatctccagcgatccggctatcgtgcgatcttgcagaaccagtttcacattattgaggatcatgctgggatctcctgaagggtgtcgaactggggcggcgtcatgatctgcaagcgatcgctgacgtgctggcgtacggcctcatcatggaaaataccaacgatagccgcgcctcgctgtttggcttcatcgatcaggctgaccaccgcagcgctgttgacgttatccagtgaagccgttggttcatccagcagcaaaatggggtaatcgacgataaaaccgcgggcaatattcacacgctgttgttcaccgccggaaaaggtcgaaggagccagatgccacagacgttccggcacatttaagcgagtaagtaatgatgccgcccgttcctgacaaatgtggcgttcaacgcctaattccagcagcggctgcatcacgacattcagcgcactgatacgcggaatcacacgtaaaaactggctgacccagcccagggtgtgacggcgaaccgctaaaatctgacgggcttcggcatgcaccatatcgatccattcgccctggtgttttatccaaatatggccgctgtctggcaaatagttggcgtaaagagagcgaagcaacgttgattttccgctgcctgaatggccgtgcagtacgacgcattcaccgctgtttaccgccagttctgcccgatggagtaccggtaagcgaatgccctgttgctgatgtaatacaaaggttttactgaggttttcaacccgtaattgctgattcattttctattcccgcaaaggccgaagggtgtcgcgtcaaggtgtgcatcagttttgcagcaccgatgacactaacagttgggtataggcgtgatgcgggtcgtccagcacccgatcggttaagccactctcaatgactttcccttctttcatcaccagcagacgatgtgccagcaggcgcgcgacgcccaaatcatgggtcacaataaccaccgccaactgcatttccacgaccagactgcgcagtaaatccagcaatcgcgcctgaactgaaacgtccaacccgccagtcggttcatccataaacaccaattttggatgagtcactaaatttcgggcgatttgcagccgttgttgcatgccaccggaaaacgtcgtcggtagatcgtcgaggcgagaaatcggaatttcgacgtcttccagccagcgtccggcctgttggcgaatctcgccgtaatgacgctggccaatagccattaaacgctcgccaatgttgccgcccgcggatacctgcgggcgcagaccgtcgagaggatgctggtgaaccacgccccaatcggtacgtaacaggcggcgacgctggctttctgccatcgcgtacagatcttgttcttgctgcccgtcgggtcgataaatgatttgtccctgttggggagccagtcgcgcggaaatggattttagcagcgtggttttccccgatccggattcaccgacaatccccagaacctcaccgggatagagctgaaaagacacatcgctaaaacctttgcccggcgcatataaatgggtcagattttccactgaaagtaacggagtcgcggccagttgtgcaggtttcatcaggcattcacctcggattggctggccgcagcggtatcgctaagctgttgttggcaataatcggtatcggaacatacaaacatacgattgccgagatcatccaacaccacttcatccagataactgtggtgagagccgcatagggcacagggttcgtcccattgctgaacggtaaagggatgatcgtcaaaatcgaggctttccactttggtaaacggcggaagggcataaatacgcttttccctgcctgcgccaaatagctgtaatgctggcatcatatgcatcttcggattatcaaatttgggaataggagatgggtccataacgtagcgatcgttcaccttcaccggataggcgtaggtagtggcaatatggccgtaacgggcgatatcttcatacaatttcacctgcatcacgccgtattcttccagcgcatgcattttgcgggtttcggtttcccgcggctcgataaagcgcagtggttcaggaatgggaacctgaaagatcagaatttgatcctccgccagcaaggtttccggaatgcggtggcgagtctggatcaaagtggcatcggtagttttttccgtggtggctacgccgctgacccgctggaagaagtggcggatagaaaccgcgtttgtggtgtcatcggctccctgatcgatcactttcaggacgtcgcagcggccaatcacgctggcggtgagctgaataccgccggtgccccagccataaggcatcggcatttctctgccgccgaacggcacttgataaccgggaatggctacggctttcagaatggctctgcgaatcatgcgcttggtttgttcgtccagataacccagattgtaaccggtgagaacctcagtcatggtgcggctcctgatgttcggcccgatactcgctgcgcaggcgtttcagcagttcaagttcggcctgaaaatcaacgtaatgaggtaatttaagatgggaaacaaagccagcggcttcgacgttatcagcgtgagacagtacaaattcttcgtcctgcgccgggctggcgatgctttccccgtattgctgggtttgcagggcgcgatccaccaaggccatcgacatggctttccgctccgctcgaccaaacaccaggccgtaaccgcgggtaaaatgcggtggacgatcttcgggatcgacaaacccgttaaccatttcgcactcggtcagcaggatttcgccaatatcaatggtaaaccccagctcctctggcgcgatcgacaccgtcaaataaccgctgcggatctcgccggcaaagggatgcgtacggccatagccgcgctgggtggaatagctcagcgccagcaaaaaaccttcgtcgccgcgtaccaattgctgcaaacgcgcagagcgattgcaagggaaaaccggcggattgcgggtgatatcgtcgggctgttgcccgtcgtcttgttccattaatgcaagctgttcctgtactaataaatcaaacacatgggcgcagttctccggtagcgcttctccacctttgggcgcagcaggcacatcgcctgaggccagcagggcgaaatccagcaggcgatgggtgtaatcgtaagtcgggccaagaacttgtccgccgggcagatctttgtaaattgccgagattcgccgctccagacgcatattggcagtattcagcggctggctgacggcaaggcgaggcaacgtcgtacggtaggcgcgcagcaggaagatcgcttccaccagatcgcctccggcctgtttgatcgccagcgcggccagttcaggatcgtaaattccgccttctgtcattacccgatccaccgccagacccagttgttgctcgatctgctcgcagtcgatcgccgggatttttggatcaccgcgtcgctggtgagccaagagttgatgggcggcctcgatggctttttcgcccccttttacggctacgtacatcagcgcacctctacttgggttgttcggggaatggccatcagatcttctccacaggccaataggacatccattccggtggggaaagtatttggccgattaatcagatagttcagtatcgccgcaggtaggtgaggagcgatttgacgctgttcttcaatgccgggcccacgcaggtgtaatggcgtgccttgttgcaggttatcgacctgaataatcagcgtaacggaaagctccggcgacacttcatcgcccgtcgggcagatctccaactgctcagcggctatgtggtgacgaaataccgcgaaaaccgcctgctgagtggcgatagcttccggcgcgccggtatgaaaacgtaggttttgccgaatcaaatcgttatttaaatcgccatccagataaacggcggtttcctgatctgccagcgtcagcaacacgctggttgccgctgggttaagttctttccagccctgacgatgcggcagagtgacctgtatacccggttcgctgagcgctttgaggatttggcgaaaggcgcgttgggaatcgtcaatgggttgatcaaaatgattaagcagtgtcatcagtcttctcctcgcactaaagtgaagaagtccacccggctggtggcaatggcgcgagcccgctgctggtggcgctcttgctgcaatgctgccagtggggtaatcaccgttttttgcagcaattcgtgcagcgcagtttgctgtagcagggcatccaacagcgcgcagcgttcggcatggggtttattgcgtccggcaatgtagctataaccataaatttcatcgttttcttccagcctgactaccgcgcgagtgatggtcatgtctccgagaataaagcgtttcccggtagcgcccattctggcctgtagctggtttaggccgatttctggcgcgcggataacctgatagcgcgggctgagattcagcgtctgccagtgagcgagcagatcttccggttggctgtgagccaatactgacatccagccctgccgggtagagttactttccatttaatgctccatggtcagttcgatcatgtcggcacgggtcaggctgacggagtactccgcaaccttattgctaccggcatgaatattcagagtacgcacacacagcagaggcgcgtgggtggctatttccagcagacggctttctttcgcctgcgcgcgacgagcgctgatacgggtctgacttcggttgagggattggcccaattgctggctaatgaactgatgcaaagagccggaggaaaactgctgtagcactggccaccaggtgagatcgggcagatagtgatcgattacgcacaccggcacgccgttaacccgacgcaaagtgcgtaggtgaatcacatgttccccttcgagcagcgacagcgctttggcgatgtgatcggtgcaaggacgtagcaccgccagcaaccgctcgctggtgggatcgctgccctgttgtagcaggttttggctgaatctggcctgagcgtgcagcgggtaatcgtaagggcgcatgagcaccaaaatgccaataccctgacggcgctgtagccagccgcgctgcaccagctcatctaccgcccgacgcagagtatggcggttaacctgatagcgatccgctaactgttgctcagagggcagataatcgccgcagcgatagttaccgcgcagttcttgctccaactgggcggcaatttgctgatagcgggtgggaaaactggtcggttgtctagataactgcatggcgggtataacctccatcaatgtaataagcccaatcccctttgctgaacaatgtagtggaagatgggtaagcgaaatcatgggttggcttcatggaatttactcatcaacgatctgccaactatgctggcaagctttaatgacagttcggttatgctcagatggcataacgatgaatctttttagttacgggaagaaggaaggagacaaaagaggaagtttgtcaacgctgagaggaagatgagtgatttcatacgcatactttttctgtatgaaaaaacatcaaatagattaaaaataaacactctgttaactggaatgaaatataagtgcctcttacaattaattagcgccgccttggcgttatcaacgtagggggttgcattatgtgccctaaaaatctcggccgtttgagcaaaataagcctggcgatcctcctggcttgctcattggcggcatgtagtgggagcggtggtggctccagcaacaccgcgaaaggtagtagtggtcagacaacgggtagtaccgccagcggaacgggtgacggcacgacggcaaacagcggtagcggttctgggtcaggctccggcgctggcggcagtggaacaggtactggtactggtactggtggtggggctggcagtggctcaggtggaacgggttccggcggtggaaccggaacaggcacttctacgcctcctttagtcgtcggaagcgtattaggcggcgtcggtggtgcggtcagtggcgtgggttccgaagtaaaagatgtggttagccagactccggttggcagcattcctattgctggtagcggcgtggtcacagtggtggatagcgcaggtaatgcggttaccgatatcggaagtggtatccagaacggcgttggacaattaggtaataatcctaatgcattaggtgtgacggctgcgggtgtaccgaaagccgtggcggatgtcggcaccggggtttccggcttgggtagtaccgtcagcggggtgggtaataatacgccgctgggtggcgtaactaacactgcgggtggtctggttgcaggggccggtggtgcagtcaccagcattggcaatggtttatcgcaggatttgcaaaccggcgcgacttctaaagtcaccacggcggcaacgggtctggttacgccagtggttgcagatacccaaggcataacacaaagcgtgggtggtgcaacggggctgggtgcacctgtcggtggtttactgaatagtgtaggtaacactgtgtcggcaacggggactcaagttggagcagcatcaccaacgctggctggcgtaggtcaaacgctacaaagtaccggccaggccgttgccagttctggtggggtggtgacacccaccacgacgaccggcggtggattgttaggaggcgtgaccgccggagctacggtgagcggtagcgccaatactaacgtattagctccggtaactaataccctaggtggcctgaccgcaggcgcgggtgttaccagcggtacggcaactaacggcggattactcggcggcgtcactaatacgctaacgggtaacgcaggggcaagcactaacaccgccacaaacggtgggttattaggaacaacaatacttaataaataacagaacctattacgctcccctgaagcattggggagcgcttcttttgctccataataaatttatgcgcaaatgcaaataaggaaatggacgatgaagaacagaatttggctgttttttttattcattgccgtggcagaaaataccttagcaaataccgtcccgatgttaatcgatcaaaataacccttcaagactcgcgcgtgaaatacctaaaccccaaccggccagaccgcagcctcccgcgttaaacacgccagccccttctcatgcgttaacgctagatacactcatagacgttcgccatttggattttattggcggcactcgctacgatgctaaaacattgctggccccttttgctccttatattgggaagaaggtgccgctaaagaatttgatggttgctactcaggctattaccaaattatatcaacaggatggttatgtattatcctacgcctatttaccggcagataattttaataacggtacattaaaaataggattggttgagggatatattggcaatacgctaattaaaagtgataacgccgcattggggcgttggctaaccaaattatccaagcgcattatggctgataagcctctcaccaaagaggttttcgaacgctataccattttaatgagcagaacgccggacgcgaaggttaccgccacggcgaaaaatcctaacaatatctacggcgctacggttttggaagttaaggccgatcatccgcgtagctggaatgtcagcaccgcgctggatagtcgtaaaggcgtatataccggtgtactcaatgccacttttagcggttttaccggttatggcgaacagttgggcgtcgcgacactattgcctatcaataataaagataacgatcgttatctagggctgaactaccaacaatatttgggtgataacggcctgctgatgcagttgaaaggcagttactataaacagaatcctaaagactacaccgatgttctgactttgcagccggacaatattaccctgtcagcgcgcgcggagcagacccaatataacggcggggtagttttcagttatccactgtatctaacgcagaagaaacaatggacggttagcggcggtctggattatgtggataaaagctacgatctgaaatcccgcgcccgattcaataacttcaataatcaattacgggatttgccggatcaaaatcagagtatgcattacccggcggcagaagtggcgttgttgggctatcgggaatatacccaggcttattggagtacccgctttagcgttcgacaagggattaacggcgcgctggcaagcagctctacgccttggggggatttaggattcactcgctggaaagtgaatggagataccgcctatttgttcgcggagaaatggcgtttaagcgcgtcggcagaaggggattggtcggataatgtgttaccggaagcggaacaggcaacttttggcgggctgcgttatggccgcggttatcctgatagtgaggccaccggtgactatggctacggcgggcaggtggaaatgcgctatatccataatcgggaggggcaatggctgaaaaccattcagccttatatgctggtggatacggccagaaccttcttcaatacgccgcagctaccggcgaagaaattggcgtcttatgccgtgggcgtcacttttggcgataacaaacattattctttctcactggaaggcgcgcggccaatcggcgatgtcccaagcgatagtactcgccgtgactggcgttttaacgccaccttcacctataactttgctaactgatttttacattatgatggtgtgaggaatgcttccgcgtagtgtcagcggaggcacagttttatcgaggtttaacgcagtttatgcacgatttgattactgctgccacgccaaattagcgagggatctttgagaccctgcacaaatttcccgtcgatcaatacatttatcaaatccaccacttcgcgctgttcattgcttaactcagccaattcgtagccagtccataaccagatatctttattatcgcattcggcatgcacacgcttaaccagtgacaaaatagcggagagattttctggatgcagcggatcgcctccggacagggataacccttggcggcggatgcgggtgtcattcagatccgcaatgatctggtcttccatctgtattgtgaatggcttgccggaattgagccgccaggtgctcttgttatagcagccggggcattggtgtacacagccggaaacaaacagcgtacagcgggttccggggccattaatcacatcgacaggatagtattgatgataattgatgatctttgtccgacgttagttggttagattttcagggcgacctattggccgcccgaatactcttaaatactgactggattaacccaactggccattggccagatgtttaacccggcgcttcacttcttcctgcttcccggcgttgaacggacgcgcatccggacttcccaaatagccacacacccggcgcgtcaccgagactttggacggctcgtgattaccgcatttcgggcaggtaaaacctttgctggtgcaggaaaactcaccggtaaaaccgcattcgtagcattcatcaataggtgtgttggtgccgtaataaggcacgcggtgatagctgtaatcccatacgtcttctagcgctttcaggttgtgctgtaggtttggatattcgccgtagcaaataaaaccgccgttcgccaacggtggataaggggcttcaaaatccagtttatcgtaaggattaaccttcttttccacgtccagatggaagctgttggtgtaataacctttgtcagtaacgcctggaacaatgccgaattcggcagtatccaaacggcagaagcggtcacacaggttttcactcggcgtactgtaaaggctaaaggcgtagccggtttcatctttccagctatcggttgcatctttcagatgggaaacgatggcgatagctttgtcacgcagttgctgatcgtcaaagacgtgggtttgattgccaaatagcgcgttaaccgtttcgtgaatacctatatagcccaaagaaatggaagctcggccatttttaaatatttctgcaatattatcatcggcttgtagtctaacgccgcaggctccttccatatataaaataggcgcaacccgagctttgataccttccagacgagcaatacgtgtcatcagggcttttttcgccagcgacagacgctcatccagtaactgccagaagcgagcttcatcgcctcgggattccagcgcgatacgcggcaggttcaggctgataacgcccaaattgttgcggccatcgtggatttctttgccattctcttcataaacgccgaggaagctgcggcaacccattggcgtcttaaatgaacctgtaactttaactacctgatcgtaattaagaatgtctgggtacatacgtttggtcgcgcattccaaagccagttgtttaatatcgtaatttggatcgccaaacttatagttcaggccgtcgcggatggcaaacaccagtttagggaacacggcggttttccggtttttacccaagccggcaatgcgattacgcaagattgcctgctggatcattcgggattcccaactggttcccagaccaaaaccgaaggtcacaaacggggtttgtccgttggcggtatgcagagtattcacttcgtattccagtgattggaaagcgtcgtgacactctttttcggtacgcgccatggcgtagcctttcgcatctggaattgcccattcttcggctatacgctggtgtttgttgtaactggcggtcacaaagggagccagaatttcatcaattcggttgatggttgtaccgccataaatatggctggcaacctgagcgatgatttgggcggtcaccgccgtcgcggtagaaattgattttggtggctcgatttcagcgttacccattttaaagccttgggtcagcatgccgtccaaatcgatcaacatacagttgaacattgggaagaaaggcgagtaatccagatcgtgataatgaatttcgccgcgttcgtgagccagcaccacatctcgcggtaaaatatgctgtttagcgtagtgtttcgccacaataccggcgagcagatcccgctgagtcggaatcactttactgtctttattggcgttttcgttgagcagcgccatattgctttgctctactaaaccacgaatttcctgattcaggcgaccgcgtaattctcgtgacacatcgcgatcgtggcggtattcaatataggcgcgcgccagctgtttataatcaccggccatcagctgattttcgaccgcgttttgaatttcgcggatatcgacctgcgtttggttttccattttttgagcgaccacgcgggcgacggtggcacaataatccgcgtctaccacgccgacagccagagctgcacgctccacggcttctttaatgcgcacctcgtcaaaaggtacctgacaaccgtcccgcttaatcactactggtttcacgatgtgactcctgtttcccgttatgcagggttatccacaaggcaatcccacagctggaaagggctgcggaggaatgtggatgacactgtggataactactatatataggtgttttgcttttgatagacactatatatgggtttaatcggaagtgacagccaacttatttgacttaggacaaggaaatattctttaggtttattccctgtacagtcgatcacaaatttgaaatttttagtggattttttgtcgaatcgcgaaaatgctctagcagaaaatcgacccaaacccgcacacggggaggcagatttgccgaagcataatacagccatagcggaacggaggctggccagtgtttctccaataccggttgtaaacgaccagcagagaaatgggcggcagtgtgccactttgccagataggcaatacccatattcgccagagtggcatccagcatcatggcgggctgagaaacgatcaaacgtccggcgggttcaacgaatttgacgcggtgatcttgttgtaattgccattttactacgcggccggttgctggattgcgatgcaacagcgccagatgctgatataaatcttctatggtttgcggcgttccattctcggcaagataatcgggagaggcggccagcaccatttgcaccggagagaactcgcgggcaatcaagcggctgtcgggatcgttacgattaccaatggccacatcaaacccttcccccaccaggttaaccactctggcatccagcgaaatatctaaatcgatttgcggataacgggctaaaaaagtcggaatcagcggcataagcagctggtgggcaaatccggggatcacgctaatacgtacggtgccgctgggctgctgttcctgactttggacactttccagcgcggtggataatgcttgccacagtggcgctacgcgggcgagcatcgcttcgccttcatcggttagtactacgttatgggtattgcgttgaaacagcctgacgccaagttttgcttccagtacgcgaacgtttttactgatagccgcaggcgtgacccctagcttgcgggctgcggcggagaaattatcgctttgagcggcgctgagaaaggcggggagtaaacgatggagatccgaaggcagcgacataatggttgatacctttagtttaaattgatgttgccgattacagactacaccaacatggggagaaatgaaaaaatgacgtaataaaaccgcagaaggaatcattatgtctcgtattttagtattagcggcacaccgtaatccggatgagtctcgtatcaaccgtcagttgattgacgctttgcgtccgctgccgaatgtcaccgttcacgagctgattcgtgcttatccagattttaagattgatgtcgctcgtgagcaggcgttattggatgcgcacgatgttgtggtgatgatgtttccattttactggtacagctcgccggcgattttaagcgaatggcaggatgcggtattaacttacggtttcgcctatggcagtgagggcacgcggctgcaaggtaaaccgctgaaattggtggtttcgaccggtagccgagctcaggattatagcgctaatggatacaatcgctatccgattgaaaacctattgttacctttccacgctacggccaatctgaccgggatggatttcctgccaccgtttttgattcagggcacgagcaatataagtgatgaaaagttggtgatgaaaatcgaagaagcggtgaaggtcataaaggggatggagtagggttgggttgtttgtaaggaagggtttttgattgttttttaatctcagaatcagcgctgagttttccaaagtcaaaattggatcaggtttcgcaagccgaatagttcggtttctcctcactcgccgtggaggcttccgagcagggttggccgtcgccgcaaccctgcacccgcgtttggcgcgaaaacggggttctgcgaacgtcccctcgtgcactctttgtccggcgagccagtgctagattggcttgcgggcgttatcaggatgccatccctcctgtcgctgcggctcaaggtgcactttgaaccgctgacgaccgttcactcttggcctcatcccagcgcggcccacttcctgattgcgtcttagtaaaatcaaaaccattttttctgaatcacaattcgccttttgctttggatatcgcttttggtccagatcttgacttggacctttaagagcatatcttggccggcgtgatgaacgaggtgtcctgcgaagcgggtagacaatgcaggcagacaatgttgtgcggaggtgcggattgttgaggctcgcgcctatgagccttaactcggttgaggctgtggaggtgaaaaatttaccaagcgaatatcaaccgaaacccgatccgatttcagatttgaactgattttgactttaaagcacatatttcagtgaccgaagtttggaattggatcgggtttccattcagagagtaaccaataacacctcaaccaaatgaatgctccgcaagctccaaatctcggcgtgaatactctcgtacaatgtgacctttttccatcagcgcggctcgttcggacatatgcgctactacgtcgttgtcgtggctcactaacaggtaagtcatgccgtgttcccgtttcagcttattgagcagatttaaaatctccgcctgtaccgacatatccaacgcggaagtgggttcatccaatagcaacaatttaggccgtaacagtaatgcgcgggcgatggcgattctctggcgttggccgccggagaactgatgtgggtagcgatgcaccgcagaggcgggcaatcccacttgctccaacgcttcgccgatgcgttgctgaatgttcttctcgccgtgaactttcagcggctcccctaaagtacgctggatactgtgctgcgggtgcagcgaagcgtagggatcctgaaacaccatctgtacatctttacgtaactgaccggtaaaacgctggctggggcgtaacggttgaccaagcaaagaaatctcgccctgccactcgcgttgcaaacccgccaacgtacgcaaaaccgtagattttccgcagccggatgcgccgattaggctgaaagtctcgccggcttcaacctgaaaacttacggactctacggcggtttttacctgattcccctgcgggaaacggacccgtagctggctaacttcaatcagtgccattctgacctccgaacatatccgcctgacgatccaacactggtaaatcagtgccgaaagtgctggcatttgggcgacaggcccacagcgtatgagtatagggatgagtggaataaggcaaatctgccgccagaccttgatcgaccagcttgccctgatacatcaccaacacgcgatcgcaatgctcagtgaccaaaggcaaatcatggctgattagcagcaggctcatgttgcgctgctcggtttgctcgacgataagctccagaatctggttgcgtagtttggcatctagcgcagaagttggctcatcggcaatcaatactcgcggattattcactaacgcgatggcaagcattgcccgttggcccatcccaccggaaagctgagcaggatagtgatgatagtggtcttcagttaatcccaccgatgccaacgcattcagtacacgctcatgggtgtctgcgcgggtcaggctgttatgtaacagcaaggattcttcaacctgtttgccaatggttcgcaccggatttaatgcgtaacgcgggtcctgcaataccatcgcaatatcattcccgcgtagtttgctccatcgacgtggttttaacgtcagcaaattctgttggatcggattctgcgcatcctctggattttcagcgtaataacacaaccgatcggcgctcactttgcccggctggcgcactaatcccatcagagaacgcgcggtaatcgatttaccggagccggattcccctaccagcgccacgcgctcgcggccaagctggaaggagattttatccacgacccgctgctggtggaaatcaatgctgaggtttttcacctccaaacgcagatcagtcatgatgagggtccagtaagtctcgcaggccatcgcctaacaggttgaaagccatgctgctgagcaaaatcgcgcagcccggaatggcggcaatccaccattggtcgaatatcacctgcataccttcggccaccatcgaaccccattcagccatcggaggacgagcccccagacctaggaaccccaaacctgcggctgcgaggataattccggccagatccagcgccagtcgaaccaccgccgagggcaggcacataggtaaaatgtgtccccaaagcagacgtatgcccttgatacccatcatttccgctgctgccagatagtcacttttacgcagtagctgaatctctgcccgtgcctgacgagcgtaggctggccaggtcgtcagagccagtgccaatgcgccattcagcaaaccggggccaagcatggcgacaaaggcaaaggccaaaatcagacgtggcatcgacatcacgacgtcagtgatgcgcattaaaaccttctccaaccagccgccgtgataaccggaaagcacgccgactaacaatcccagcggcaaagtgatcaccgtgactaaaagcactaagcccagcgttgggcgcgtaccataaatcacgcgcgacagcatatcgcgaccgtagctgtcagtacctaaccagtggccgggttccggtggcagcaaccgttcggcggcgttttgccaattcgggttatgcggtgcaagccaaggagcaaaaatggcaatcagcactaacagggagagaataaacagcccaatgctggcggaaggagagcttttcagcgcacgaaaaaatttcattatcgacatatcagcgcgatctcggatctaacagctgaaccagcaggtccgtcagattattaatcagaataaagcacatccccagtagcagcgtgccgcccataatcgcagtggtatctccggcaaatagcgcactggtgagatagcgcccaatgcccggccaggcaaagaccgtttctgtcagcactgcgccttccagcatgccggtgtacacgagtgcgatgacggtaagcagcgtgccgcgaatattcggtaagacgtgcatcagcaggatacgtatttcgccagcgcctttggctcgcgcaagggtgacgtattctttattcagctcgctcaggcaggcagagcgcgtcagccgggtaatactggccagcgcatagtaagacaacaacgccaccggcagaaccaaatgggctgcggcattagcgaaagcgccgctgtcgccggaacgccaggtatcaatcagtgcgaaaccggttttggcttctaccgtgtattggtaaatatcatccagacgaccggggccggggctccactgtagcttggcgtaaaacagcaatagcatcagcaaccctagccaaaagattggtactgagttgcccagcagggtgaagaaacgaatgagggaatcgactttactcccggcccagcgcgcgcagattaatcccagcaatacgccgagagacgccccgataatcagtgataacgtcgctaactccagcgtagcgggaaatgcggtcagtaaatcctgcaataccggctgcccgctggaactggcaacgcccagacagccatgagccagttggaccagataatgccaaaactgcaccggcagcggttgatccagtccaagctgctgcctaacctgttgataagtcgcctgactggcatgatcgccgacgatttgcagcacgcgatccaccggcgacagcgctgacaacaggaaagtaatcagcaacaggccgaatagggtcagggcgaggctgaagatccctttgatcagcgcccaaaaacgacgccggggcaaggctcccggcgtattatttaaagctacggacatgtggctatctgctcgcttgtattaaaagttatcccaaccgggtacgcgggtacctatttgctgacaaggtcgtaataaaccatatcggcattcaacccttgttgatagcctttcacattatcccgtaacacaatttgcgttttggcctgatcgataaagatataaggcgaattttgcagaagttcctgctgtagcttggtataaagctggatgcgcttggcggggtcggcttcggcaacggcggcaagcgtttgtttattcaacccaggaattgcccaaccgtttaaaccggcgacggtgctgcttttgccatcgttataggcaaaagcgctagcgttggaatgagcgtcaaaatagtctggaatccacaggcgaatcgcagactgatgctgtttggcgcgaacccggccataaacctgactaccggcggctggcagcagtactaatttaacgccgccctgagcgaagctggcctgtaaagattgggcgatggtgataaacggcggtttattttccacatccagcgtcagagtcgcgtttttaataccggctttctgtagcaaggctttggctttggcaggatcgaaagtaaacggcgtttcttccagcgcacccggcaaaccgaccggcaggaagctttgatgcacaaaatactgtcccttcagcaaatctttggtaatgccttggtaatccaccagatagcgagctgcttgccagaattctggcttgcttaacattgggttagctggattagcggtgttaaagactagatagttttgttcggccgacgggatttcgaccactttaacgccagcctgagttttcagcgcggcggtctgatccggccccagttcccgagcgatatcggcatcgccctgttgaatcaggaggcggcgagcgcttggatcgggaacgttcttgataataatgttttttatcagcggcttattgcccggcgaggttgggttggcgtctaacacaatggcctgatgaggttggtaaacccgcattttgaacgggccgctgccggcagaatgcattttcagccaggcgttaccgaaatcaccgtctttttcatggggagccaccgccgctttatccacgatagaggcaataggcgtagacagaatattcagcgctaccgctgggctgacatcggcgctccagcttagttgtagggtattgttatcaatcttcttcaaatgcttatcgatattgtccggctcccagccgagaacgttcaggataaaggccggtgaacggttcatttttaccgcgcgagtaaaggaataaataacatcgtcggcgcgcacaggattaccggaagcaaaagttgcggcggggcgcagttttaccgtcagggttttattggcggcgtcaccttgccagctttccgccaaaacagggatcactttggccggattttcccgatcggcctgcatcaggcgctgatacaaacttgggacggtctgaatgctggataattcgttactttctgcggggtcgaggctgacaatatcatccagtgactggaccaccaccaaggtatccggcggtgtcgcggcctgaacgctggcagacaaagttgccgcaaccagcaacgacagaattcttgctttcattaaaacactccccgaatagacagatagtctcagccagacagaacgatgaggtaaataaattatttttaaattatttaatcgcatcgcacgatagaagctttgctgtctgtgggcaaagtctcaagggttatttcatataactatctagactatagacggagtttcggatctataaaccgatgtatttatcgtcggtggacgttaaataaccctgaaatcttgatgtgtgttagctttcgagaatcatgatttgattataatgaaacaatatttcactataattcgagtatctaaaaaatgattactgggaatatccatcatctcgatttactcccttattttccccaaccgttgcgtgctgccattgaatatgtaaagcagcatatcaacgcagaaactccgctgggtaagcatgatattgatggcaacaatctgtttgtactggtttccaacgactgtaccgattggcaggaaaatcgtcgggcggaatatcacgctaaatatctggatatacagattgttctggcgggtcaggaaggtatggcttttagcaacctcccagcgggagaaacggaaaccgattggctggccgataaagatattgcttttttaccggtaggaataagtgcacaaaatgaaaaaatgatcttgatgcagcccagtgattttatcgtgttctatccgggagaagtacataagccgttgtgcgcggtgggggaaaaggcacatgtaagaaaggcggtggtgaagatgaacgcaagtttgttgctttagtctggttgggtgtttgataggggcgatttatttcagtggtgaattgagccgtagccacttcaatctaattaaagcaccttctggacgggttttaataatccgccgtccttggcggattatgctgaatagcgtaaatacttaatccgcggagagtgttgctaccatcacggctttaatcgtatgtaaccggttttccgcctgatcaaacacaatactgtgtgcagattcgaacacttcttcggtcacttccatacctcctggcatagtgtattgctcggctaattgcttgcccagtgtggtttggtcatcatggaaagccggcagacagtgcaggaatttgacctgcggattgccggtcagcttaaccacgttcatattgacctgataaggcttgagcaaagcaactcgctcgttccatacctcctttggctcgcccatggagacccagacatcggtatagaggaaatcagcgcctttcacgccttcggctatatcttcagtcagagtgatttttccgccggttttctgcgcctgcgcctgacaggccgcgaccagtttagcatccggccagcaggcttttggtgccaccagccgtaaatccattccaaccaacgcagcggcttccaacatggagttgcccatattgttacgagcatcacccaaataggcgaaagtcatttcttgcagactcttttttggcaaatgttcctgcatagtcagtaaatcagccagcaattgagtcggatggaattcgtcggttaagccattccataccgggacgccggcaaactcagctagcgtctcaacgacctgctgcccgaaaccacgatactgaataccgtcatacatccggcctaacacccgagctgtatctttaattgattctttatgcccaatctggctaccgccaggcccgaggtaagtgacgcgagcaccttggtcatatgcggcaacttcgaaagagcatcgggtacgagttgagtctttttcgaagatgagcgcgatattcttacctgccagtttttgtttctctgtgcctgatttttttgcctttttcaattctgcagccaaatcaagcagtgtggtaatctcggcgggggtaaaatccagtaacctcaaaaagtgacgtttgtagaactgactcatagcgctcatctccatgcattccgaatagtctaattgaatttaaattcaacttatacgtataaatattcaattgcaactacaaaagataaatctttctcgtttatagtggaggcattggcggcggtgtgggaaaatagggctatataacgcccattgactgaggataaaggcatggcaaaccgcgaaaaactggatgagcaacgtgatgagacccgcctgatcatcgaagaattactggaagatggcagcgatcctgacgcgctgtacaccattgaacaccatctttcttctgaaaagtttgaagtgctggagaaagcggcggttgaagctttcaaactgggttacgaagtgactgatgcagaagagctggaagttgaagatggctccgttgtgatgtgctgtgatgtgatcagtgaagtggctttaaacgccgaactgattgattctcaggtagaacagttggttgcattggctgaaagctgtggcgtgaactacgacggttggggaacttattatgaagacccgaacggtgaagatgacgaagacggcgagtacgatgacgaagaactgattgatgaagatgacgacggtaaacgtcattaatctgccgctttgagttttatctaataaacccgcgctgttgatagcgcgggtttttttattctatgaataagtgacttaattacattaaatcgagagactacaacattttcaacatagtcacttcgcaatccacatgaccagtcgcacccattggcccgtcgatgtgttcgaagcctaatttttcatataaggcgacggcgctggtcaggctggcggttgtttccagataacagcggctaaaatcatgctgacgagcaaattccagcgcctgtaatgccagttgtttcgccagacctttcccacgtagaaccggcaagaaatacattttttgcaattcgcaaacatcggcttcgccacatgacaaaggcgctacgccaccgccaccggcaatacggccatcgacctcgataacccaataagcgctacgtggttggctatatagctcatgcaaatgctccagatttggatcggagacggtataacctttatccgccgtcaggccgaattcggcagaaacatcgcggataacgttggcaatggcaaggttgtcttctgccacgataggacgaaccagaagtcgcaagggagtggctgtggtcatggcatagttactcagcaaaaataggtggaaaggcgtgctctgaggacaggtgcccagcagtgtgtactgaccagcgagtctgtagtgctctgtaataccatcgaataccgcagtaatgcaactatgcccttcgtacttggcgctgcaggggtgttggctgcgtccactcacccgaatcacttactgatgtaagctcatcgggattcgttcactggccgcctacctgcaaccccaattacttgggcataaacgttatatattgggcgctgaaggggtgttggctgcgtccactcacccgaatcacttactgatgtaagctcatcgggattcgttcactggccgcctacctgcaaccccaattacttgggcataaacgttatatattgggcgctgcaggggtgttggctgcgtccactcacccgaatcacttactgatgtaagctcatcgggattcgttcactggccgcctacctgcaaccccaattacttgggtataaacgttatatattgggcgctgcaggggtgttggctgcgtccactcacccgaatcacttactgatgtaagctcatcgggattcgttcactggccgcctacctgcaaccccaattactcgggcataaacgttatatattgggcatagagatttataacgaatggcatagaagtattcgctgttttcactataaaactaaagccgcagggatgagctgcggcttcagatttttgggatataaatatcccgcagttcaagctgggtgaagctcagactactttacagcgccgcgatagtggcctgctgctcaatcagttttactttcgcttcggcacaggcagccagtctctcacgctctttagcaacaacggcttctggcgctcgtgccacaaaaccttcgttacccagtttgctttcgatacgctcgatttcaacatcaagcttggccacttcttttgccagacggtccagctctacggctttgtcgatcagaccggccattggaatcagcacttctgcgccttcaaccagcttagtcacggacaatggccctttatccccttcaggtaacagggtgatagaggaaagacgcgccaacgactggataaagctctggttttccagcactcggcgctgagcttcagcgctggcgccgcgtagcaacacttccagtggtttacccggagaaatattcatttctgcacgaatattacgcaccgcaataatggtctgcttgatccattccaaatcgctcagggctttttcatcaacctggctggcgtcatattctgggaaaggttgcagcataatggtgtctgcggtaatgcccttcagcgttttcacgcgttgccagatggtttccgtgatgtaaggaatgattggatgcgccagacgcagcagagcttccagcacgttaattagcgtgttacgcgtgccgcgcagctccgcctcagaaccgttgctcattaccggtttggtcagttccagataccagtcgcagaattggttccaggtgaattcatacagaatacccgcagccaaatcgaaacgataagtatccatcgcttcacggtaggctttcaccgtctggttgaattcagccagaatccagcggtcagccagtgacagcaccatttcgccgccgtgttggccgcaatcctgatcttcggtgttcatcaacacgaagcggctagcgttccacagcttgttacagaagttacgataaccttccagacgcttcatatcccagttaatgtcgcgaccggttgaggccagcgccgccagggtgaaacgcagggcgtcggtaccgtgcggctcaatgccgttcgggaattgtttttcggtacgcttgcggattttctcagccaactgcggctgcatcatgttaccggtgcgtttttccagtaattcttccagcgagataccgtcaaccatatccaatggatcgataacgttacctttggacttggacattttctgcccttcgtcatcgcggatcaaacctgtcatgtagacggttttgaacggtacctgcggcttgccgttttcatctttcataaagtgcatggtcagcatgatcatgcgggcaatccagaagaaaataatgtcgaagccgctgacgataacgctggtcggatggaaggttttcagcgcatcggtctgctctggccaacccagagtagagaaggtccacagaccggaggagaaccaggtatccagtacgtcttcgtcctgacgcagagcaacgtctgcacccagattgttctcgcgacgcacttccgcttcatcgcggcctacgtacactttgccagcttcgtcgtaccaggctggaatgcggtgaccccaccacagctgacgggaaatacaccagtcctgaatgtcacgcatccaagagtagtacatgttttcatactgcttaggtacgaactggatatcgccgttttcaaccgcttcaatcgcgactttcgccagcggagcagtacggacataccattggtcggtcagcattggctcgataaccacgccgccacggtcgccgtaaggaacggtcagatcgtgaggtttgatttcttccagcagacccagtttgtcgaactcggcaacgacggctttacgagcggcaaagcgctccatgccttggaacggttctggaatcgcaccgctgtatacatcggtgacttcaccgttggtgtcgaatacttcggcttcgctacggatatcaccgtcgaaagttagaatattgatcatcggcagggcgtgacgtttaccgacttcatagtcattaaagtcatgggctggggtgattttcacacagccggtgcctttttccatatcggcgtgttcatcgccgaggatcggaatgcgacgacctaccagcggcaggatcacttctttaccaatcagatccttgtagcgcggatcttctgggttaacggcgatgccggtatcaccaaacatggtttccggacgggtcgtggcaacaaccagatagtctttgccttctgcggttttcgcgccgtcggccagcgggtaacgcaggtgccacatggaacctttggattcgcggttttccacttccagatcggagatcgcggtgcgcagttttggatcccagttcaccaggcgtttaccgcggtagattagatcttctttgtgcagacggacgaacacttctttgaccgcgttggacaggccatcgtccatggtgaagcgctcgcgctcccaatccacggagttgcccaaacggcgcatctgacgagtgatggtgccgcctgattcgcctttccactgccagattttgtcgatgaaggcgtcgcgaccgtaatcgtggcgagttttgccttcttcagcagcaattttgcgttctacaaccatctgggtcgcgatacctgcgtggtcagtgccggcctgccacagggtatttttcccctgcatgcgctggtagcggatcagcgtatccataatggtttgctggaaagcatgacccatatgcaggctgccggttacgttcggcggcgggatcatgatgcagtagctttctttgctggtatcgccgttcggcttaaagtaaccctgcttttcccagtgttcgtagagcggttgctcaatctcgtgcggactgtacgtcttgtcgagggagttgtttgttttttccattttatttatttgttcagtgagttggcggcgttgccgtggtcaaatggaagccgacgctgcgatatgacttatatcggtcgcgcgccaactgtttcaaagtttcttcgtaaggaacgaagtctatcacttcatggaaagcggtggcaaaacctgcgaactccggtagcaggctaatcagcaggtcgcgcggtgaatttccacgtctctccggccaggccagctccaccggtgcgccgtactttggcccttcgcccgctaaattatgcggaacaaattgctccggcgctcgttgccacagggcctcgtcaagacgttgagcctgttcctgactttcacatgcgatcagcacccgtttgcccgcccgccagcgttcagccgccagatcgcatgccagcgcctcatgggctcgcagctcgccggaaggttgatcgtgatcgagaagatagaaggttgcgtttttcataggctctctacgacgttaagggcacgaagtgtgcccttaagataactcggtgtatacccttgtctctgaagtaacagggggattctctgttacttcaatgagttcgggtagatatcaaacgattaatcgtcgccgttcagacctgcgcgattcaacaggaactgcgacaacatggcaaccggacgaccggtagcgcctttgttttttcctgaacgccatgcggtacccgcaatatccaggtgagcccaagtatatttacgagtaaagcgcgacaggaagcagcccgcagtgatagctccgccagcgcgtccgccaatgttcgccatatcggcaaaattggagtccaactgttcgtagtactcatcgcttagcggcaagcgccacgcgcggtcaccggcttgttctgaggcgccaatcagctcgtgagctaatggattatggttcgacatcaaaccggtaatgtggtgacccaaagccaccacgcatgcgccggtcagggtggcaatatcaatcaccagctctggttcgaagcgttcaacgtaggtcagagtatcacacagtactaaacggccttccgcatcggtattcagcacttctaccgtctggccggacatagtcgttaacacgtcccccgggcgataagcctgcccgcccggcatgttttcacagcccgccagcacgccgataacgttcagtggcaattgcagctctgccactacgcgcatcacgccatacacggtggcggcgccacacatgtcgtatttcatttcgtccatgccttcggctggcttgatagaaataccaccggaatcgaaggtcagccctttgccaaccagcacaattggcttagcgtcagcattcggattacctttatattcaatcaccgacatcagggattcgttcttagaaccttgccccacggccagataggaatgcatgcccagttctttcatctgttgctcaccgataacgcgggtgatgatgttagtgctgaacgcatcggctaactgacgagcctgagaggccaggtaagcggcgttacagatatttggcggcatattacccaggtcttttgccgctttgataccggaagccacagccaaaccgtgctgaattgcgcgctctccgctggtcagttcgcggcgggttggcacgttgaataccattttacgcagcggacggcgcggctcgactttattgcttttgagctgatcgaaggtgtaaagggtttcttttgccgtttctaccgcctgacgtactttccagtaggtattacggcctttgacgtgcagttccgtcaggaagcaaacggcttccatcgaaccggtatcgttaagggtattgatggtgttttgaatcacttgcttatattggcgttcatcgagctcacgctctttaccacagccaattaacaggatccgctcggagagaatattaggcacatggtgcagcagtaatgtctgacccactttgccttcaagctcaccgcggcgcaacaaagcgctgatgtagccatcactaattttgtcgagttgttcggcgatcggggatagacggcgaggttcaaaaacgccgactacaatacaggcactgcgctgtttttccgggctgccgctctttacactgaactccatgcactctcctgaatcttaaagacaaaggcgggagctaccgctagaatgtagcgctccgcaacgatctctctccgttgtgttaacgacgtgtgttaacctgaacggcataagttgttttgttttggcgactataagcatgttcctataggacacctaaacgctagatgctgtaatactattttagctgtgaaggttgccatatgatgagaataaatggcggattagcgatgaaactatcgattttcctgcaaaaagacaagttttcacaggcgtattagcgtgatcatcattagatatctggtacgggaaacactcaaaagtcaaattgcgattctattcatcctgctactgatcttcttcagtcagaagttagtacgggtattaggtgccgcagttgacggtgagattccgacaaatttggttttatccctccttggactcggcgtgccggaaatggcgcagcttattctgccgttgagcctattcctcggcctgttgatgacctacggcaaactgtatacggacagcgaaatcaccgttatgcacgcctgtgggttaggcaaacggtctttgattgccgccgcattaatcttatcgatgctaacttgtggtctggctgcgattaacgccatttggctcgggccgtggtcgtcaaagcatcaggatgaagtcttgaatgatgctcgggcaaacccaagcctggcagcgctggttgaaggccagttccaatcctcgcaggatggtaacgcggtgctgttcgtcagcagagttagcggtaaagaattccagcgcgtgttcctcgcacagctacgcccaactggcaatcagcgtccatccgtagtggtggccgacagtggccacatgatggagcgccctgacggttcgcagatggtattgctgaataaaggtactcgctacgaaggcaccgcgctgctgcgtgatttccggattaccgactttaatgattatcaggcggtcattggccatcaaaccgctcagcagaacaataatattgcggaacagatgtcaatgagcgccctgtggcattctaccgatcctgacgcgcgcgccgagttccactggcggctaacgctgattgtttccgtggttatcatggcattgctggttgttccgctcagcgttgtcaatccacggcaggggcgtgtgctcagtatgctgccggctatgttgttgtatctgattttcttcctgctgcaaagctctctgcgctccaatgcgggtaaaggaaaactggatccgttgatttggctatgggcagtgaacttcgcttatctggcgctcgcgctgatccttaatgtgtgggatagcttgccagctcgtaaattacgagcgcgtttgagaggggctgcctgatgtttggcgtattagaccgttatatcggacgaaccatcctcaacaccatcctgatgacgctatttatgctggtgtcgctatcgggcatcatcaagtttgtcgatcagctgcgcaaagttgggcagggggagtattcggcggctgcggcggggatgtataccttgctcagcgtgcctaaagatattgaaatcttcttcccgatggcggcgttacttggcgctttgctcggtctgggaactttggctacgcgcagtgaactggtggttatgcaggcttccggtttcacccgtatgcaaattgccgctgcggtgatgaaaaccgcgattccgctggtattgctgaccatggcaatcggtgagtgggttgcgccgcagggtgagcaaatggcgcgtaactatcgggcgcagatgatgtttggcggttcattgctctcgactaaaaccgggctatgggccaaagacggttcggactttatttacattcagcgcgttgtgggcgaaaaagagctggccggtgtgaatatctatcattttgatgatgccgatcgcctgcaatccgtgcgctatgccgcaacggcgacttttgaggataaaatctggaagctgtcgcaggtggatgaatccaatctgagcgacccgaaacaaatcaccggtgctcaaacgctgacaggggaatggagaaccaacctgacgccagacaagctgggtgtggttgccatgagtccagattcgctctctattagtggattacataattacatcaagtacctgaaacagagtgggcaagaatccagccgttaccagcttaatatgtggagcaaaatttttgcgcctatatccgtagcggtaatgatgttgatggccttatcgttcatatttggcccgctacgcagcgtaccaatgggggtgcgagtggtcactggtatttgcttcggctttattttttacgtgctggatcaaatcttcgggccgcttagcctggtttacaagattcctccggtgctgggtgctttgttgccgagtatgcttttcctgctgatcagcgtttatatgctgttaaaacgtcgatagcggcgtttttttcaacacttgaactaaaggcagtgtaataacagttgcatgcggatcacaggtaagtataattcacctcgttctccgcatactacttcagtgccgaagtggcgaaatcggtagacgcagttgattcaaaatcaaccgccgcgaggcatgccggttcgattccggccttcggcaccattagtatgaaaatcaagtcaccgcaaggtggcttttttttttgcctaaaatccagttcccgcatagctttccctctcttttcagtcaacctgattcaatctacatcaagttactgatgtgggaacatttgcgagtaatcccgcttagataatgtttgtccccacacagagcccttgaaaggatactcatcatggctttgagtgatgtgaaggttcgtacggctaagcctgaagcaaaagcctataagctgactgatggcgacggcatggtattgctggttcactccaacggttcaaaatattggcggcttcgttatcgctttggcggtaaagaaaagatgctggcgctgggaaaataccctgaagtatcgctggctgatgccagggcgtggcgggatgaggcggggatgaatagcgcaaaagggtagtagcgaggtagggtgatttctaaggccgcttcttttgtcattgtcagtttttagctgttttcgagttaattaaaagagcaagaaaatttaaatttaccttaagtttaatttatttctgaagttggatggcgtgattttttgatgttccatacaggcagatatgagaaaggtttctagcgaggtttttttaatcttattcttgactattttgctattttttaaatttagaataatagcttttagattgatttattcgtcttgtagggattttcctacagcgttatgagaaaattcatatatcagatgtaggatatttcatttattattatacgccatttcatttttattggttttgatcaaataagatatatcgctattaaattaaaaacatttagcacttaagtatgacaatctttactttatggatacgaaacaccatatttaactgtgttttgcaggataaatatctatttaatttaactaaaacgatcttttaatcggaaaaatcacaatttactagataaaaagatcgtgtatagttcgttcgtgttgttcggggtgaaatttaaggaaagttgataattcagagtatttagaaaaatctgttaactatgacatatagtgtaggcataaagaaagtcataagatgggtatcttcttaattatcctctatttgtctgcctataaaaaaatattatcggttttgctattctgtctttttagaaggtttgtaccttttaataattattttgttttcttatttaatttttaatggctattcaattgcggtgttttcagctaagaatttgaatttatcgcacaatcatatctgtataaaaatattatctaatcaaaggtctttattatgtctaatttcaagagaagtgtattggctacagcatttatttcttctgcgtttatttctcaggcatttgctgccgatgaaggtaatgggcgagtccattttactggtacagtaattaatgctccttgttcgattgcgccaaattctaccgatattaatgtcgatttgggacaggtatcaaataaggtgctggaaactggcaataaacattccgagaacgttagctataacatcgatttgcaagattgcgatctgagtgagcaaacggctggttcagtaacttatccggcaatgtctaaagttagcgtgaccttcggtggggtttccgatgcctctgctgtggctttgctggctaacaccggtagcgcgactggcgcgggtatccgcctgatcgatgctaatggcgcattactaaaagttggcgataccagcgctgatatcaatctgatctccggtattaaccaaattgcttttgcagctcgtgttgaggcaactggtacagcagtgaaggccggtactattgtttctcaggctacctacgcactgaactataaataatctctttttttatcacgtcgatttaaggggaggcaactcccctttgttcatttgtgccaaaaaagaaacgctctaaatcgatataaataattatttatacgccataagacagtgatttatttatgcagagtaattctaaaagaaaagcaatgatctttcgaatgatgccaatattatcgttggcaggcataggtttattcctgcctgagtgtgctacggcggtagaatttaataccaatattattgacgctcaagaccgtaataatattgatctttctcgatttgaaattaatgactatacgccaccaggtgattatcttctggatattatggtcaatggcaggttattacctgattcatctctgattacctatttgcctattgatgaagggaggtcaagtaaggcttgtttaacgcctgaattggtcaattctttaggtcttgctccagcagtgcgtaattcaatggggttatgggataacggtcgatgcgtttctatcgatgataaacaagaaataacggaaagttacgataaagaaaaacagcatttgattatttctattccgcaagcctggctagcgtacagcgatccaaattgggttccgccatcgcaatggggtgatggcgtacccggcgctttgctggattacaacctgtttgggaactattacgcacctaattcagggaggagtacgacaaatatcagcagctacggtaccgcaggcgccaatatggggtcttggcgtattagggccgactaccaatatattaatagtgacaatgaaggtacgcattacagtaattttgactggtcgcaggtttatgcttttcgtgctatttcgtcgataggtgccaaatttgtcggtgggcagacgtacctcagctccagtatttttgattcttttcgttttttgggggcttccctcgcgactgatgagcggatgttgccacctacgctgcgtggctatgcgccacaagttatgggaattgcccgtaccaatgcgcgtgtcgttttgagccagaatggcagaaccctttatcagactaacgttgctccaggcccatttgttattcaagacattagtgaaacggtgcagggaaatattgatgtgagagtagaagaagaggatgggcataccacttcttttcaggtcagcgctgctagcgtgccatttttaactcgtaagggttcagtgcgttataagaccgctttggggcggccaatgcatggcagccataatgcgctgggcgatccgattttctttaacggggaattttcctggggagccttcgacgatatatcgctatatggtggcctgattgccacgtcgcaggattacacagcggttgcgatgggaatggggcaaaatttgcatgagtttggtgctttatccgttgatgcgactcactcacaagctcaattacctgagcaggaaaaactgagcggggaaagctatcggatcaactattccaaacgttttgatcagactaatagccaaatcacctttgccggataccgtttctccgaaaaaaactttatgagcatgaatcagtatttggatcggctgagtggcaataactatctacaaaatgacaaacagacttataccctgacggccaaccaatatctgacatggccggatgtcacgatgtatttatccgcgacgcataaaacctactggaatgatgtttccagtaataactatgggatttcgctcagcaagcttttggatattggtccgtttcagggcatttctgcggctgtttctgccaatagagtgaaatacgagaacgaaactgaaaaccagattttcttctcttttagtttgccaattggcgcagggcagaaaattagctatgacgcgcagcgagataagacgaacggctacacgcaaaatatttcttactttaatagccaggatgccaaaaatatctggcgtgtcagtgctggcggcggaaatcccgaattgcagaagggtgatggtgtatttcgcggcggttaccagcaccgttcgccttatggagaatttggtattgatggtagccataaaaataaccaatacaactcggtgaatgccaattggtatggctcattaacggcgactgcgcaaggcgtagccgcgcatcagaatccgtcgggtaatgaacccagactgatgattgataccggtaatatttctggagtgtctttcaatattaactctaccgtaactaacggttttggtttggccgttgccaatggagtgacaagctaccagcaatcggatgttcgggttgatatgcaaagtttgtctgatgatatcgaagtgtataacacagtgattcagaaaaccctgaccgaaggtgcgattggctaccgaaagattcgggtggtgagaggtcagcaactgatggcagtcattcgtttatccgacggtagttatccgccattgggttcttcggtagtagcagataaaaccggcgctgaaatcggaatagttggagagaacgggctggcttatctggccggattggaagaagcggcacagttaaccgtgcaatgggggaaaaatcagtgtcgtctgacattgccagagaataagggtatcaactccggaaaaattttactgccttgccagtaacccaatgattaattgaccttcagattgacctgaatggctcaggcaattgggcaatagagagtacagaactgacaaaatttaaagtgagtattaatgatgaatttagaaaaaaaaatgagacgtatgacggctagtcagtctaaaaacatgttggtggtgctggcgttaatgctgctcggcactatgaatagtcaggcggcaataaatttggaccggacacggattgttttcgatagtagcgataaatcggtcagcattattcttgaaaataagagtaaaacttccccttatctggctcagtcctggctggaagatgcgaaagggaaaaagattgagcgtcctctcgtcgccttgccgccgatgcaacgtattgatgcaggtcaaaaaagtcaggttcgtattatgaaattgcctgatgccagcacgcttgctacggatcgcgaaacgttattctattttaacgtgcgtgaagttccgccaaaaagtgaaatggctaacgtggttcagattgctattcagaatcgggtaaaactcttttatagaccaacggcgattaaagcggattataaagagtcctggcaggacaaacttcagcttactaaacaacgtgaaagtctgaaaatctataacccgacgccttattacgtgacgctgggatatttgagtcaggataatcgaggtaatttccccggttttgatagtgtgatgattgcgcctttcaatactgaaatcgtgaaaactccgggctatagcggagatcattatagcttgggatatatggatgattttggcggcttggtgttgcgcatatttaattgctcatcggttgagtgccagatccagcctgcggaaaagaataaataatgtttattgccgtttcgttaatggccaaggataaataatgattcctttttttctagctaaattgcgccgcttctatggctcgctggttcttttgagcgcaactttgttactggctccaacggcatatgcccttgattgtgtagaagcgggcaccggcatggttataaaaccggcaattccgattggtgcattggcaattccatccaatgtcgctgcaggaactaaggtctgggaatctaatgatattacggtgacggcttactgcgataatgtgctgggaagtgtccgggatcaagtatggttttattttaacccgttgaataacgcattaggtcagggtttgcagttaggcgtgagttatttaggtcaggagttagaaactaacggtaagggaataaataccaatacggcacctatcgttaaagggcagagcgtaaccgtgaccgtgaccttcagactttatattaaagtgacaggaaacccgccctccagcggcatttatcccggggctaatacttttacggttttccagttggatggctccaatgggcttaaccttactccagcagcgaagaatctaagatattctctatctggattaagttcgacgcgctttattgcctgcggtgcggatttagtggtttatccggaatcacaggtcgttagttttggttcgtttaataaatcgctgttatcaacgacgggaaatgggattagcgcgccatttgcaattacttcagtgaagcaaggctgtttgtccaacttttctattcaggcacagttttcaactaccaatccgttaattggtgataatgccatcgatatgcaaaatggttctaaattgaccatttatgatgacgctaatcaagcggtagtatttaaccgttatgctgattttgccgtgatgaatgatgtgaatcaggtaacgaaaaattataccgctagcctgaatgccattccggggcaagccataaaattggggcagtttgatgcgacggcaatagttaagattaactattactaggttgagacaggcaagtgaagactgaaaagatgcagccagacgaggctgcatttatggtgcacccagattaattgatcaggaatgatttaccttgctggagtactaaatcacaggctttagttttaattttttcagtgagttgggcagtgcccagattattgagatccagacttttaccttcgccggttttcagtaatccccccaggccttcctgatagtcctgacttttggcattttccgtactggtaatgcccaatttactcatcagctgatctttaattgccgaagtgccattggccgataaaacgttattttgaacgcagtattgcaaaatacctgcggcattcgtcatggtactcgcgctgagtgctttatcgccgccgttaagcagcccggtaagcgaagataatgatgaagagctatcccccgatttactgtactcgtccgctgcattttttaccgagtcgaataaactgttggcttgagcactaccggttaccagagtgctggaaaaggccaaagccagtaatagacgatgggtgttattcatagaaactcctgtttcacattgtgggctatagccaaaagcctgaagcactgaagcagttagatagaccgttagtcgttaacttcacgggcagcataacgtaaaaatataacttaggagagcgtgtgattttagctctactgcatatttacagatttagaatccgcatatcaggttgtccgaaagctgataacttatcgggttggataatagaaacacactgagaatcatcggaaatctacccctgagtgacacattatgggatgatcatgacaacaacataatttaggggacgttatggcttcgctgaaagatgtggctaatttggcttcggtatcattaatgactgtttctcgggcgattaataacccggagcaattgcggcctgaaacctatcagcgagtggcgcaggccatcgaagctcttaattatgtgcctgatttttctgcgcggaaaatgcgaggtaacaccacgaaaacctcgacgttaggagttttggctttcgatacggccacgacgccattttccgttgaaatgctgctttcgattgagctgacggcgcgagagtgcggctggaatagttttctggtgaaccaaacttcagcggaagacagtgaacgcgctgttaatcaactgctttcccagcgtccagatggcattatttttaccactatggggttacgcagtatccagatcccagcgcgcttaatggataaaaagttagtgcttgctaactgcgtgagcgacaattcggatgtggccagctatattccagacgatttttggggacaatatcaggcgataaaacgactgattgaacgtgggtatcgccgccctttgtgtttttatctgcctgaaaatacgctcgctgctcaggctcgtcgcgctggcgctgaaaaagcgtggcaggatgccggtctgcctttaagtgatttacgtcaggaacacatgatttggggggatgagcattacccggatgtcgttacactgctaaatgcacactgtcctaatggaaaactagattttgatattttggtttgcggcaatgatcgtatcgcttttctcgcttatcaggtgctattagccaaaggcattaaaatcccgcagcaagttggggtgctcggttatgacaatatggtcggtatcggtgggctatttttacctccgctgactacggtgcaattgccgcataatgaaatcggccgtgccgctgctttgcatttaatccaaggcagaacggacagcgaaattcataaaattccgtgtcctctgctagaaagatcctctctctgactttccaattaaaccgactgcggtgttcatccgcagccgtttaatcctaaatttttcaacctgtttttagcgtccagtattgcccactcgccagcaaggcctggccattatctgcaaaaagtgaaagctggcgcaggccttcacttggataaattcgactggtcaggctagcttcgccattatttacaaacacctctattgatgatttatcgataaatattctaaatgataagatgtcgccagcggggatttcgacgctgcgatagccggaaagacggtgctgcggataatggcgattgaggatcaaccgttgagcctggttgtcgataaagacagatacgccttcatctgcgccctcaattccccccaaacgtaggccgaagcgttcggcgttgctatcgttgagattccattgcaactggatttccagcgcgctggcctcgtcgactatttgtcgggtagcgttttccaatggcaacttttctaactctacgtgctggcgacgcagcgtttccagctcagatatgggctgcatccataacttcccattatccttaatacttaattctcgcggtaaagtcaggcaaccggcccaatattccgctttagaaggcatattggattcccacatatccatccatccaataacaattcggcgaccatcttttgctgtgaatgattgcggtgcataaaaatcatgtcccagatccagctcgacaaaaggttgggcacgatgaaagaccgtgccgggtcgccaggaaccgcgtaaataaccgctctggaaccgattccggaaacggtagccttcggcttttataccttgcggggaaaacattaaaacctgctcccctcccagagtgaagaagtccgggcactcccacatatagccctcgccggtatccgctttggctagaacctgttgaaaagtccattggtgcagcgtttcgccgcggtatagcaacacatgtccgcaatcgacatgatctcgcgcaccaatcaccatccaccaaacgccgtcttgtttccataccttgggatcgcgaaaatgcatgatgccgttcggtggagtcaggataacgccctgtttttcaaaattgattccatcttgactggttgctagacattgcacttcgcgaatagcgccatcatctcccggttgattgagccaaacgtgaccggtataaatcagggtcagcgtgccattatcatctaccgcgcagccgctgaaacagccgtctttatcccactcatcgcccggcgacagtgcgatcggctggtgttgccaattcaccatatcggtgctggtggcgtgcccccagtgcatgggcccccagttttcgtcatagggatgatgctggtaaaaggcgtgataaaggccgttatgataaatcagtccgttgggatcattcatccaacccgccggaggagccagatgataattggggtaaaaagcgtccccgacctgaggaattaattgttgcagcgcatggttagcgcgatccagttgcgttttcataatcattcacttggttgataagttaagagataagtgctggtttcggggatcagcgcgtagcaggaagcaggaaagcagagtcaggcccagcaccatgccgcccatgatcatgtaagttgcagcgaagccgcgtaggtcatagctatgtcccgccaatggcgacaacacgctggcgcaaacctgagtgacaaattggaaacccaccagatataaagtggcggagaggcgtggatcgaactggctggtgatgtatttgaacatggcgatcaataggatcggcagttcaacggcgtgtagcagtttcattagggaaatggtgacggcatcatcagctaatcctgaaccgataattcgcagcgacatgatcataccgcttagtagcagagcttgtttggcaccaatgcgattaaccaagaagggagccaaaaacatgccgcctgcttccaggaatacctgtagtgaattcagaaaaccgtacatttcattgccatggcgcggatctgaaaatagagaagagaaatagaccgggaattgttggtcataaacgttataaatactgacgcccataacaaatacgaccaaagcccaaaaacgtggcgttttaagcaggcctagagcatctgatagggttaatgcgctagatttgccatattccaactgattgagggcatcggttttaacttcccgaagacagagtaataacagcagaaagaccactgccgatgaggatgccatccaaaaattgatattaggattaatgttaaacagcattccggcaaagaaagtggcgcaggcccagcctaaagatccccacatgcgtgctttgccaaattcaaagccgacaatacggctaacgcgttcggtataggattccagtgcgccgatgcccgcgaagaaagtggctcctatatataatccgcccacaattgcgccagccagcatgttaagtcgcaataacggagcatagataaagatgaagaaggggccgctgagcagcaataagccgccaattgcccacaacagatttttccgtagccctaatttatcctgaataaagccgtatagcggttgggcgcataacgcagtgagcgcgatggctgaaaatgtagtgcccgtttctgcgccttttaaaccgacactttgatttaaccatatggaaaataaagagaatgccgaagaccaggtgaagaaaaaagtaaacagcagtccgctcaaaatcagatattggttacgaatgttgcctttcatagcagtaccctgatggctttgtatggcgctattgttaacgttaacttttcatcatgagaagctagcgtcttctttatttgcgatgttaatcacaaatgttaacgttaacattaatgggttgtgagctggataccataaattaattggtggacaagaaagcagaggaatacaggaaaaagagatgttgatttgttttggcgatgattattagcatattgatatgcaaaaacgattgccatagggtaaatggctgatatagcataattgcccttatcttttgttgcctaaaatggcgcatcccatgatgaatacgtcaaataagacacaatccctcgatgggcaacgttcagcctcattatcttcgtcaacacttcccgatgctgtccggaataaagaaagtgttcaacgtatcctggttatcaaactgcggcattttggtgatgttcttttaaccaccccgttgttaaatacgctgcgagaaaactatccgaatgcgttgatagatgtgctgctttatggtggaacagaagcgatgctggcggcaaatagcaccgttaatcatgcttatatcgtcgatcgagatttaaagcatgctggtctcaaggcacaaatttgtggcgaaaaagcgttgtttagcgatctgaaaaaacagcgatatgatctgatcctcaatttatccgatcaatggcgcgccggcgtttattgccgtttattacagcctaaattcagtatcggtattcgttttcctaaacgggataacgggctgtggcgctactgtcattcccgactggtggatattccgcgggcagaagaacagcatacggtattaaataatctggcgattcttgagccgcttgggattgagaatatcagtactcaagtcacgatggcattcagtcaggctaatatcgatcgggtcgttgagatccgccaacagaatcaacttgatagctatgtgctgattcaaccttctgcccgttggcgattcaagacatggtctgccagtcatttcagccaattgatcgattcactgactcagcaaggtcagaagatcttgctgaccgggggacgcgactccgccgagttggattatattgccgaaattattggcggctgcgcgcagcctgagaagattattaatctggcggggacgttggatttacctgaattagctgtattaattgatcaggcaaaactatttattggggtagattcggtagcgatgcatatggccgcagctctgcaaacgcccgccgtggtgctgtttggcccaagtaatctgcaacagtggtatccttggcaggcgccacatacattgatatgggcagggaactatcggacgcttcctcagccaaatgaaattgatacagatacaaccgagcgttatctggacgctattccggtgaatgaagtgaaaattgcggttgatgcctggcttaacggctcagatcattaatccatggccattcattctccccttaacccgtctgaattgagagtaccatgacgacaacattaagctctccggaggttcgctccccggaaatatctttggccaatcgcttaagcggtttactggccggctttgctgcttttctgctaggggtagctctgccgactgccacttctttcgtgaatattgcgttggttctgattattatttgtttgattattcagcgcgacaggctgcaattcaaagtgttggcaaccaacccaattgtttatttacccgcggtgatgttcttgctgctggcggcgtcattattattccatcataacgattacggttctgagatggtgggtaaaatgaagaagctgctgtatgtactaccgctggctttatttttcctgcatcagaatcgtttgattaagctatttggtgccggtttcctgctggcaaacgcggttatattggcaggttcactattggttggcgtattgcacgtaccgctaggcatgatcgacccggcgaatccgacgatatttaaactgcaaattacccaaaacttctttatggcattagcggcggtattgtggctgatgctggcgtttaaaagcagcggttggaagcgtttgggatatggcgttctggttgcaggtgcttgctatagcgtgctgtttttagtactgggtcgtaccggttatgtggctctggtcgtagggttaggatcttggctatttttctcattgggaaaccgccaacgtcttggtctggtggctttaggcattattgcatttgctattatcgcgctggttcctaaccgggcaactgatcgtattatgctgggcgttaatgaaattaaagcctgcatggcatcaacttccggcgatgaatatcaggcttgtaactcttctatggggcagcgttccgcctttgctatggaggctgcacgactgattaagcaggcacctattatgggcaacggtgcgggcggtttcttctattcgaatccggaaactggctataagatcaataacccgcataaccaatatctgctggaaactattcagtctggtattttgggcgtggtgatatttttggcctgggtagtgtgctgtttccgtgcagcctggcagcaggagccgaagttacgcaatctgctgctggcattactctgtagctatatggcctgtaatttctttaactccttcctgctagattattcagaaggccatctgttcatgatactggctgcgatactggcgggatattcggtatcagcgaagcaaaaaaggcctcagacgctataagttagccctggctgatcgacgataaaacggctctttattggagccgttttgcgttgtcgctctcctaacctatggctggcttctggcaacctgcaaacttgtctgagagggactcaatctgttttgtcgtggattctggcggtcaaaatagtcagatatgcactttatctgattagctcgtaactgcaagccaggggtaactgagcgcccgtttttagccgtaataaacccaattatatatttcccattcaaatcataaatctcagaatctagaaaccattttattctcattctactcagccacgttaaataacccggagcagcgttttttttcttattgggtaaataatcgccattatgggtacagcaccggattaactactctgttaataaggctgctcttagcaggcatagcgcacaggtttaattcaggcgtgggcagtatctggaatggcatactagaacgagtgccgaagtggcgctgtagctggatctgagaggtttgatgcggtgagtttgtagatgcaggtttgcatttatagtgcagaattttggtgagtagaataataacttggtagtatgaaatttgtactgtaaataagactgtttgatgacatatctgaagctaacggaattacattatattctgtctccgctgtctgtatatggattattttctcagaaaaaatagaggtttgatcagcttaaagtgtaatagttgagtagctttaggaaaatatagataattcattaaataatgctaataatttatacaaaataaacagtaaaaaaattaacaagccatcacgatctctatattatcggttttttatttgattttttgtgaataaaaaacaggtgaaaaataatttaatttacttttttctatcaagatggcgatatttaaatgaatgaatcatgactaagcattggtgatggatatattgataaataataattagtttgttttctgtacagccgagtgaaaatgaatttgtggaaaataaatactcattttttagtttatatattttaattagacgtttgcggtgggtttttatgctgcttgatttgcttttgaccgactccaatgttgtgagaatctaatgcatagaaaatgagtatttattatttataagtggataaatgtaacttaaagcacttaacatgataataacatgtgttattggtgtgcggtttttttcgaattaacagtcactatctgttataggaataatcctattattgcctgactctattcatttgctcttggcaatagaatgcttatgaatataggagttttaagcaggatgtttttatttttaaacactcataataagattgagtctgtagtgtggttatcactacatttttaacgttaaaacctcagggatagcaaggattaacaaaaatttattttccatggtttgttttttattaatttattgattttattgtatttttatcattttgctttaccgatctaactattaatcatagatggtgtaatacctaatatcaaggcggggtttatttgttttgaattggcagagttatctgattctttgtcattaaaatttaatgcgcggtgattataaggaaatcaaaacactgtggtgaaattggctaataaatttaatgtgatgcgtaattcgttgattgatagtaatcataaatcatgatgtggatcacttttggccatttgtaatatgtgtgataattttttcaatgatttacattttgaaaaatccagcctactttcgggatattacgcaatagttttaaatctgactatgataaagatgtatttctattcctgagctggttcaggttgattctgctgatcgcctaaacagaatctacatttattaacctatccaacgtcattgagagaatcatggcaaactcatcagcgaataaactatcgttacccgcactgacttctcttgtagttggttcgatgattggcgcgggtattttctccctgccagcgacattcggacgagcaacgggtggattcggcgccattattgcctggtgtatcgccggtggcggtatgttaatgctggctttcgtttttcaaacgttagcgcagcgcaaacctaatctggattccggcgtattcatttacgctaaagaaggttttggagattatctaggattcgcctcagccctgggtttttgggccggtacctgtattggtaatgtctcttattttgtgttgatcaaatctaccctaggcgcgtttttcccaatattcggtgacggtaatactattccggcggtattagtcgcctcggtgatcttgtggggcttccatattctggtattacgcggagttaaagaagccgcagcgataaataccattgccaccttcgcgaaaattatcccaatctttatctttgttatcgttctgatttttgcctttaaaggcgatgtctttgcgctgaacttctggggaacgccggatgtcgttaaaggggctgatttatctcatcttaatgattatggctacgttggccacgcggcggcggcaatgagcaccgtggtagccgagcctgaatcactattctcgcaggtgcgcagtaccatgctggtcacggtatttgtgttcctgggcattgagggtgccagcgtttattcacgttacgctaaagaacgcagtcacgttggtattgcgacggttttaggctttattggcgtgctgtgtctgctggtattaatcaccatgctgtcttacggcgtcatgctgcgacctgatttagccgctctgcgtcaaccctccatggccggtgtattagaagccatagtaggacgctggggcgcaatatttatcagcgtcggactgattatttccgtgctcggtgcttatttatcctggtcattgctggcggccgaagtgcttttttctgcggccaaaagtaacagtatgccaagaatatttgcgacggaaaatagtaatgcagtaccctccgctgcggtgtggctgaccaatatttttgtgcaaatattcttagttctgacgctatttaccgattatgccttccaactggcactggagttaaccagttctctaacgttgattccttatctgctcgtgggtgcttacggtctgaaattagcctggaccggcgaaacctacgaaaccaatgctaaaggccatcgaaaagatctgatttttgcattgatcgccaccttctacgcggcgctgatgttgtacgccggtggcatgaaatatctgctgttgtccgccattatttacggtccaggtaccatcctgttcattatggcgaaacgcgagcagcatcagaaagtctttaatggcgctgaaaaaatcttgtttgccatcgtgattatcgcagcggcggtcgcgctgtatagcattttcaccggaatcatcaccatataatttactggagctattatgtcggataagaaaaccaagaagtcaggcgcttacggcgtacattcagaggttggtactttacgcaaagttctggtttgcgcgccgggtaaagcccataaccgtctgacaccaagtaactgtgacgaattattatttgatgatgttttgtgggtagaaagagccaagcgcgaccatttcgatttcatgaccaaaatgcgtgaaagaggcgtggacgtagtagaaatgcacaatctcctgactgagaccctgcataatccggtggcaaaaaaatggattttggatcagcaaattgtacctaatgaagtttcgttaggcattttgcatgaaacccgcagtttcctcgaaggtttggatccgcgaacgctggctgagtttctgattggcggtttatctacgcgtgaattacacgaagtgggtaagtgcgacaaagaagaattgaagctgattcgtgaagccgtcggtattaccgagtatttactgccgccgttgccaaacactttatacacccgcgataccacctgttggatatacggcggcgtgacgttaaatccgctgtactggcctgctcgccatgaagaaaccatcctgactacggcgatttataaattccatcctgatttcgccaatgccgatatcaatgtgtggtggggggatccgactcagcaccacggttcagccacgctggaaggcggcgatgtgatgccgattgggaataaaaccgtcctgattggtatgagcgagcgaacttcccatcaggcgattacgcaactggcagcttcactgttttccaataagaaatctggggttgagcgcgtgatgattgcggcgatgccgaagctgcgcgctgccatgcatctggatacggttttcaccttctgcgatcgcgatgtggtgacgctttacccggcgattgttaatcagatccagactttctcactacgtccggatgatggcccgactggcatgaagctgagccgagataaaggcacctttgttgacgcggtagccggtgcgctcaatctgaaaaaactacgagttgtggaaactgagggcaacgattacgacactgagcgccagcagtgggacagcggcaataatatggtcgccatctctccgggcgtggtcatggcgtatgatcgcaataccaaaaccaacactcagctgcgtaaagaaggggtggaagtgattgaaattgtgggcagtgaattaggccgtggtcgcgggggcggtcactgtatgacttgcccgcttatccgcgatgccgttgatttttaattgctgataaccgccagctgcggaacggttctcgccagctggcgacagtgctcttaaaaaatagtcgagagtggacagtgttatcacgctggtttgctgtcggctatctgtatttaaaatcgccgagtgttttgggcgacgtaatagatttttagaaaaggacggcactgtgaaatacgtttatacggtactttttctgttaattgtcacattaaccactctttttgcctttcagaacagcggcgccgttcaggtatcgctactctttaatgagataaccttgcccttgtccgtgctgatcgtcctgatttactttttgggcatgttgactggcggagttctgctaacgctgatgaataagctgattcgcaaagtgataaaaaaaaccgataacaaaaccgatagcaagaacgcagtcaatgggcgctgagataagggataaacagaatgtaaatctgatgatgttaggccgtttgtttctgtcgttgcgaagctatctgcggctaatcctaaccacaatgtcatcatattttcactttttaacccgatttttgctggtgcgtttcaaccgctgttgcgcaattgcaaccccaatatttgattgaacgagatctttatagtgaagacaaaaattgtagtgactctgttggcaacgctgttattggctggctgcgataaacctgcgcctgaagtgatggaaagcgtgcgcccggtaaaaatatttacggttgaagacagcggccagaacggcgtgcgttatttcccggcgcgattgcaggctggggatgaaacgcaactgtcatttaaacgtgcgggacagcttcagcaattactggtgcgagaaggtgaacaggttaagaaagggcagaatattgcgatgttgaataacaccgatctgaccttgagagtacgggatcgccaatcggcgtttaatctggctcgcgatcagttcaatcgttttaataccttgcaagggcgcaatgccatttctcgcgctgagctggatattcgccgagccgagctggaatccgctcaggcagcgctggatatcgctcgcaaagagctgagtgatgccaccatcagcgcgccttttgacggtgtgattgctaacgttagcgcgcgtaatcatcaggtcatggccccggggcaggtggttgcgaccttgagcgcactggatacgctggacgtggtatttagcgtgccggaacgtttatttaccgcattggatattggtaacaaggactatcaccctacggtgcgtttaaaccatttaccggatcgggaattcctggccgaatataaagagcacactacctccaccagcgctggctccatgactttccaggtgacgctgaccatgaaacgtccgccggacttaccgctgttgtctggcatcagcggtagcgttcgtatcaatacgcataaattaactggttcgacgaacgcatcgattattgtgccggtagaagcggtatttaatcccgatagcacccagctcaatgatgcgcgagtttgggtagttaaagaggataaaggccagctccacgttgaagaacgggaagtgcaggtcgggcagctgatggccaacggtatccggattacttcgggtttgaacgacggtgagcagattgttgccgccggtaccagcgagcttcgtccacagcagttggtgcgggcgtgggtccgtgagcggggtctgtaatgaagctaacggacaatttcatcaacaataacacgcgaatctggctaacgattctgttgctaggaattggcggacttattgcctatctgaatatcggccgtttggaagatccggcttttaccattaaaaccgcggtggtagtcactcgctacgaaggagcctcggcgcagcaggtggaagaggaggtgacgctgccgctggagaatgccatccaggagctgtcttacgtcgataacgtcaggtcaatctccagcgccggtttatcgcaaattaccgtcaacgtaggttcccaatacgggccgaacgaactgccgcaaatctgggatgagttacgccgaaaaatcagtgataacagcgcccgtttgcctcctggggccggtacgccgctggttaatgacgattttggcgatgtatatggtttcttcttctcgctatcgggagagggctacaccaatcaggatttacgtaattttggcgagcaattacgccgcgagttggtactggttaacggcgttgggaaagtcgctattgccggcattttaccggaagaaattcagattgatatttcgcgggcgcagatgaccgccgccggtattactccgcagcatttatcggatttgctgagtcgccagaacgtggtttccaactccgggcaactgttggttggcagcgaatcgatccgcctgcatccaaccggtgaatttaatagcgtgcaggaattgggaaacttattggtcagccagccgggcagcccgaaaagcgtctatttgcgtgatattgccaccgtgactcagggagtgactcattcgcctacaaatatttatcgtgcgaatggtcagcctgcattgggggtggggatttcttttgcgcctaacgtcaacgtcgtcacggtggggaatgccgttaaattgcggttagcgcagctagagcctgaacggccatccggcatgcacatcagtattttttacgatcagtctcatgaagtggaaggcgcggtaaacggctttatcctcaacttcctgctggcgttactgatcgtggtcgttaccttattaatctttatgggcgcgcgcagcggcattgttatcgcgctctctctggcactgaacgtgctggggacattattgattatgtggttgtttaatattgaattgcagcgtatctcccttggtgcattaattatcgccctcagtatgttggtggataatgccatcgtggtggtggagggagtgctggttgggcgccagcggggagataatattttcaccgcgatcagtaaagtggtgaagcgctcgatgttcccgttgctgggcgccacgatcatcgcgattctggcctttgcacctattggtttatcaaatgattccaccggcgaatattgccgctcgctgtttgaagtattactgatttcgttaatgctgagttggttcacggcgctgaccttaaccccggtattcgccaaatgggccttccaaaaccaaaaatcggctccggttgatgaagataagccggttaagcagccttatgacggctggttattccgtaactatcgggtggtgttgaataagctattgcagcatcgcagcatcacgctggtggtactgactgcgatgctggtggcgtctatttacggctttggtagcgtgcggcagagctttttcccgccttcgaatacgccgatcttttttgtcgacttatggctgccgtatggcacggatattagctataccgaaagcatcgcggcggaagtagaaaagcatatcaaggagcaggagggcgttaccgataccgttggcactattggtcagggcgcgatgcgctttatgctgacctataacggcgagcggcaatatgctaactatgcgcaaattatggtgcgtaccgatcggttgaatcgcattcccggattgatcgaagaaaccgaacaatttatgcaggatgaatacccgcaggtgaatgcgcggttgaagcgcatcatgttcgggccatccaataacagcgcgatcgaagcgcgatttaacgggccagatccggacgtattgcgatctctggctacgcaggccgaaaaagtgattgtggccgatcctctggctgatggcgcgcgtcatgattggcaggatcgcagcaaaatgatccgtccgcaattctcagactatctggggcgtgaactgggcgtagataagcgtgaagtggatagcactctgcggatgagctttggcggcttgccggtcgggttgtatcgggatggtacgcggttgatgccgattgtccttcggacaccggacgccgagcggttgaacgcagaaaggctcaacgatgtcatggtatggagccaagcgcgtcaggcgtttattcctatcgataacgttgtcaccagctttgaaaccgaatgggaagatccactcattatgcgtttggatcgtaaacgcacgttaacggtgcaaaccgatccaacatcggaaggcggggaaacttccgccgagttgttacagcggatcaggccgaatatcgaagcgatcaaactgccgtcgggctatgaactggagtggggaggcgattacgaaagtacgaaagaggcacagcaggggatcttcaccagcttgccaatcgccttcattatcatgtttgtcgttacagtgctgatgtttagctcggtacgtaacgctttggctatctggctaacggtgcctttagctttgattggcgtgaccgttggtttcctattaaccggaattccttttggttttatggcgttacttggtctattaagtctgagcggtatgttgattcgtaacgggatcgtattggtagaagaaattagcctacagcgacaggaaaaaccgctgcgggatgccattattgatgcctcgaccgcccgtttacggccaattatgctcacggcctttaccacggttctggggctggcgccgctgctgagcgatgcgttcttccaaagtatggcggtggtgattatgttcggtctgggttttgcaacggtactgactttactggtattgccggtgatttacagctgtatgaatccagagccaaaaccgcagccgactaccgagtaatgtattttttcagctaaaaaaccgtccgatggacggttttttttcggctgtggtcagaaccttgtttataaaaacgcttttttatcgttcctcgattttcccatctgtgcgccagctctcttattaactgaattaacaaccctctttgtttcacaatgaaactcgaatttccattggtggtttcataatggaacgttttccctgccggttactcaacggtttttctcgctctatagtggttttagccaaagtaaaaccgtctcccgccaaagaccgatgctgacccgagacgccaccttctaaaatacatttacgcttcaggagccagatatgcttaaagtcattcaatctccgtctaaatatatacaaggcgctaacgcacttcagtctattggtgagttcgctaagctattggcaaataactatttcgtcatcgccgatgacttcgtcatgaaactcacgtcggataccgttggcagcagcctgcaggtcagcgatgttaaatatcacttcagccagttccgcggcgaatgctctcgtaaggaaattgaacgcctgaccgtagagctgaaaaaacacggttgtaacggagtgatcggtatcggcggcggtaaaaccctggatacggcgaaagccatcgcccactatcaacatattccggtggtcgtagtgccaactattgcctcaaccgatgcgccaaccagcgccctgtcggtgatttataccgaagaaggggagtttgctgaatatctcatttatccaaaaaatccggatattgttctgatggacagcgcgattatcgccaaagcaccggtgcgtttattagttgccggtatgggggatgcgctttctacctattttgaagcacaagcctgttttgatgccaaagctatcagtatggcgggcggagcctcaacgctagccgccgtgacgttggcgcgtttgtgctacgacacgctgctgacggaaggttacaaagctaagctggccgtagaagccggtgtggttaccgaagcggtagaacgcattattgaagccaacacttacctgagcggcattggttttgaaagcagcggtctggcggcggcgcatgccattcataacggttttaccgtactggaagagtgccaccacctgtatcacggcgagaaggtggctttcggtacgctgacacagttggtgctgcaaaacagcagcatggagcaaattgaaaccgtactcgatttttgtcagcaattggggttacccatcacgctgggcgaaatgggcgttcatcaggatatcgaaaagaaaatccgcgcagtggccgaagccagctgtgccgagggtgaaaccatccacaatatgccgtttgccgttacgccggacagtgtttacgcggcgattttggttgccgataggctggggcgcgctttcctcaactaagttgaattcattgtgataacgaaccgggccgcctgtgggtcgctcggttctgccccacacgggtaaacgagcctctttatggagcacagcatgaaaaaactgattaatagcgttgaaagcgttttacaggaacaaattcaaggtttagtggaagcgcatccggaactgactctgcatcaggaaccgctgtttattactcgccgagatgcgccggtacaaggcaaagtggcgctgatgtccggtggcggcagcggtcatgaaccgatgcactgcggctttattggtgcaggaatgctggacggtgcctgtcccggtgagatttttacttcgccaacgccggatcaaatgttcgagtgcggtcaggctatcgacggcgggaaaggcgtgttaatgctgataaagaactacaccggcgacattcttaattttgaaaccgcagccgaactgctgcacagcgaaggcaccgccgttgccacgctggtgattgatgacgatgtcgcggtaaaagacagcctgtacaccgccggacgccgtggcgtcgctaatacggtgctgatcgaaaaattattaggtgctgccgccgaacgcggtgattcactggatgaatgcgtggcgttaggacaaaaaatcaataatcagggacattccatcgggattgccttgggagcctgtacggtgcctgcggcgggtaaaccgtcctttattttggctgaaaatgaaatggagtttggcgtgggtatccacggcgagccgggcattgaacgccgttcctttacctccctggatagcaccgttgacgcaatgttccagacgttgatcgaacacggacagtatcaacgcacgttgcgccactgggatcgccagctgggcgattggcaggaaactcgtcagagcaaacagccgttggcggcaggggatagagtcgtggtgctggtgaataatctgggcgctacgccgctgtctgagctgtacggcgtttggcatcggttagccgcgcgctgcgccgagtttggtttgaaagtcgaacgtaaactgattggctcttactgtacttcgctggatatgcagggtatgtcgattacgttgctaaaagtggatgatgaattactcacgctgtgggacgcaccggtcaatactcctgcgctgcgttggggttgttaaatgtcggaggaaaaaatgggattaaccaaacaagatatcgtcaattggctgcaactatgcgccgaggtttttactcaacaacgggatttcctcactcagctagacactgaaattggcgatggtgatcacgggctgaacatgaatcgcggttttaacaaagtggtcgaaaagctcccttcggtggcagacaaagatattgggttcatcctgaaaaacaccggtatgacgttgttatccagcgtaggtggagccagtggcccgctgtttggcacgttctttatccgagcggcgcagagtactaatgctaaacaaagcctcgatctttccgctctgtgccaaatgtttaaggacggcgttgagggcgtagtgatgcgcggtaaggcagaacccggtgataaaaccatgtgcgatgtctggtgggctgttgtggatcagttggaaaaggccaatcagcaaggtttatcagtggtggacgcattgcaacaaacggtggaacgctcgcagcaggcgctggccagcaccattaccatgcaggcgcgtaaaggccgtgccagttatctcggtgaacgcagtattggccatcaggaccccggcgcgacttcggccatgctaatgatgcaggcgttattgcaggtaaccagccgttagccatgcgcgttccatgaactgcttgccataaagtatcaaaagtgtgtccgtcaggccggtgcgataaccgcagggcagtatcagattccaggaggaaagatggtcaatatcgttgtagtttcccatagtgcgttactggctcagggcgttgccgagctggcgcagcaaatggcgcagggcggatgtcggttggctctggccgcaggggtggacgacgtggatcatcccatcggcactgacgccattaaagtgatggaagccattgagtcagtttacgatcccgccggggtattggtgttgatggatcttggtagcgccgtgctgagcgctgaaaccgcgttggacctactcgatccggagatggcggccaatgtgttgctgtgcgcggctcctttggtagaaggcacgctagcggcggtagtcgcggcatcggcaggctcatcattacaacaggttcgtgccgaagctatgggcgcgctggtggcgaaaagtggccaattaggcgaagaaatccagtcggaagaatctggctctgcgacgggattcggcgatgatgcgcaaagcgtcagctggcgagtgcaaaatcccaacggtttacacgttcgcccagcggcaaagttggtggaggctttggcaccttttgacgccgagctactgctggaaaagagcggtaaatgcgtgaacccacgtagcctgaaccaactggcgattttgcaagtacgtaaaggggataccattcgcctgctagctcgcggagctcaggccgaattggcgctggctgcgtttgaacacttggctcagcagcattttggtgaatcagtcgcgaacggggataacgcggaactagcgggaattatggtgccaaacggagtcgttcgtgggccaatactccagcttcctcctgcgatgacggcgtttattccccgcactatcagtgccgaacaagtagcggacgaacagcaacgtttacaacgggcgctgatccaaactgcgacagatttggaatctctggctgcgcaggtgggagaaacgcttggtgaagaatttggggaaatattcagcgctcatcagctcctaatcagcgatgaagagctgcagcaggcggtcaatcagcggatggctcaagaacgtgtttgcgccgagtccgccctgcaaagtgagttgatggcaatggccgcggattatcaggcgctggatgatgaatacctgcgggttcgcgagctggatattcgcgatattcttaatcgggcgctgggacatctgaccggtttgccgttggtttcgttgcacattggtggtagcgcgttgctggtggcggatgagctaatgccatcggcgttggccgggctgcgccgacagcaagtaaaaggtatttgcctgagtcaggggagcacggtgtcacacagcgcgatcctgtcccgcgccttggggattccaatggcggtggggatgagcggctgtttggatgccactcatacaggcatgatggctgaactggatacagccagtggcgtgttaaaaatcaagggggaagctaccggagcgaaggagactcgccatcaaagtagctatattccagcaaaataatatgttctcagcgatatgagaaaaggagccagaattggctccttttctctgcttaactatcaagatattaaaccgtttctccgcctttaaactgtccgatatccagccggtgcagcttcactttacgccacagtgtggtgcggccaatgcccagcaaggttgccatttcattaagctgaccctgacacaccagcgcggcgcgaattatcgcctgccgttctagctcttgcagtgatagcacgggctgcggctgcggggcgtccggttcaagaagcaatttttcacccagcaaatgctcaggtaagtcattgagacgaattcggttattgcgacaggacatcgcagcgcgttcgacaacgcttttcaactcctgatcgttgcccggccacggatactgattgagctggcgattaacgtcttcatcggtctgatactggcagtgaaaatgctgccctaaatcccgcagggtatggtgtaccagcagttgaatatcctgttggcgctggcgtaacggcgggatatgtagttcgaaagactgaagggtatagaacaactggcggcgaaaacgcccctgtttgactagcagcggcaaatccgcgccagtggcggcaataatccgcacatccaccggaatcacccgattggaattgacgcgcatcagaatgccggttttaacgatctgcagcagcgcggactgcatttccggcgacaggtattccacctgctccagatataatgtgccaccgttggctaactcgaatttactcggttgtccggcctcgccttcgctggcatcgctgccgaggaattctcgtgccattaagctttgcggcaatgcctgacagttcaaagcgatataagggccatcggatcgttcgctggcgttatgaatcgcctgccctagtcgctgttttcccacgccttcttcaccgtgtagcaagataggatgctggcctttagctgcctgtttgccgtaacgaaccaaacggcgcatttccagagagctaaccggcatctcatcgaaggtatggctggcccggcccaattggttgtgtaccatttggcgcagcagttcctgtggatgcaacaatgcgataaagccgcaacgatcgccgtcgggtatgggttttagcgtgagtaacgccggaataaactgctgttggttctcaaacgtcacctctacgtgactgagaggactgcgctgctgaattgcgtgggtcagcagagcgggaagcgtcagtaactggttgaccggttttcccagactattggttgcatccagccgcaaaatggcggcggcgcgccgattgagatacagcaggcagccacgctgatcccaggccatcacgccgtcctccacgccgtccagcagggcgtttaactcattcaaatggcgattggtttctgccagcaagctgtccgcatgcagggaattaccgatttcccgcgcgatagccagagtcagcggtaaatcactggcggctttttccgttagcaaacagcccaacacgatcacggctcgctgtcgcccgctgttgtcgtataccggcgttgcgcagaaatgccacggatgtagcgccagcttaaagtgctgactgccgctgacctgcattgggttaccttcggctattgctagcgccggagcgttagtaccgatcaaaccttcggcccagtagctaccggcggtaaaacctaattcactgagctggcgcagcgttttcggatgaccgcattgccacagggtacagccgctttcatccagaataagcaggctgcactcgcgggattccatatattcatacgcatcttccagcgccgcttgtcccagaaccaacagatcgtttttacgctggcatatcgagctgaacgttgcgccagccgcccgatgcggaattcgccaagtggcgggttgcatcagtttatgacagcgttgccaggaatcattcagtgcgggcgtaaccgccggcgcctgagagttgtaagctgattcagtaggaagcggggcagactttggggccaaaatagatttacctcaaccagacagtgatctccaaaaaccgagaatcactattaactctgattattgtctgaattgctgtgaagccgcaggcaaatgcggctgtcactttattcgcagcgaattgactgagggaatagtgagctttcaacctatcaagctttagagtctggatgacgccagtgaatttgccccggcagaatcagccgctgctgttctaacggttgctcggcgatcagagcggtaaccatctcgaagctatgacgcgctagcccttggcagtcctgagcgatggtatcgatttttagcggcaggcagtcaaacaggtaatgatcgtcaaagctgcacaggtgaatatcgctatccatcaattgatattggttcaggtaacgcagcaccccttccagcaggccacaggcggcggtaaataccgctttcggtggtcggcccaattgagcgcaaagttgagcgatcatttcatagccggagctaggcagataattgccgttgagtatccattccgggcgacattctacgccagcgcgctgtaaaccctgctgaaatccgctcaggcggtcgcgcgtcggtgaaattcgcggctggccgccgaggaaataaaactcatcctgatgttgctgcgccactttctccaccagcgtggcggtagaggtaatagaatcggtgattaccagtggaagatccgattcgccgatcagccgatccatttgtatcaccggcagccgagtgttgatcttttggtattcgctatcgttcagctggctggaggcgacgatcaaaccgtcaacctgacgctgcaccagactgttcaccgccatcatttcctggctaggattttcatcggtgcaggcgataagcagttgtaacccggcttcgcgacacagcatttccagctcgcgggaaatcagggcaaaaccatgattggtcatttcaggcaccaccagacccagcgtatggctgcgggtcgatcgcaaagaacgagcgtggaaacttggctggtaattgtgttcgttggccagagcgataatgcgatcccgggtttcgtcagaaacacgatattccttactgcgaccattcagaaccaggctggcggtcgatttagacacaccagccagtttagctatatcgttaatagtaatacgtttactgtttttcactgactgcatctgccaccgggaaagatgcccttattctaacatgggtgacagtaacaaccagtgccgcaggtgcagttcacccttgccgctgaaaattgcctgtggttcaggctgagggaaatagctggaagtcatgacgccttcaccattgttgataaagatttccacgctacagcggtcgaaaagcagctgtaactgatgcacagaaccgcgccagtagcggaactctcgctcgcctgtacgcagattattgcgactaagagtcaggcgctcgccgtcccactccagcgtcatggtgtcggccagttgtagggtgaactcgccgctgatttccaactggatttccgcattgtcgatgcgaaacggtggtgcggcatcggcgcttcctttccactggaaaagaacggtgcgtagtgcggttaattcacgggctggttgctgaataattttgccattacgcagcgacagctcgcgcggactgctcatcgtgtgaatccagccgtaattcactgttggctgatataactcatcctgattcggaatgcccatccagccaaacagtaaacggcggccatccgctgccagcgtggtttgtggggcgtagaattcgaatccggcgtccagctcgtggaaagcaccgtggttaaactggccttgctgataatcgagttttccgcagacataaccggcctgataagtattgcgataacgttcggcctccgctgccagcccttgcggacagaagatcagcacatcttcgtcgccaagcgtaaacagatccggacattcccacatataaccgaagtcattcaaaccattgataccagaaccagcgatttcacccagactttgccattgatgcagatccggcgaacggaacagcaacactttgcctttcagctcaagatcctgtgcgcccagcaccatgtaccactgaccgtcgtgctgccaaactttcggatcgcgcacatggccggtatagccagcaggtaggctcagtactggccccagcttatcgaattctccgcgcgcattctctcgcgccagacattgaaatgcggtgcggctaccatctggatatttcacattaccggtatacatcaggtgaatgcgttcgtcgtggatcaccgcagagccagagtaacagccgtggctttcatattcttcgctcggtgccagcgccagaggctgatgttcccagtgaatcaaatccgcactgcgccagtgtccccaatatttactgccgtgggcgcaggccagcggattccattgataaaataaatgatagtagccagcgtgatagataaaaccgttaggatcgttcagcagcccgatgcacggagccaaatgccagccgggccgatgtggatcccgcgcggcccgaacctgaccggacatcaccgccaacgtgagttgtttgagtaaactggcttcttgcattattcactgtccgttttgtatttcagcagcagcgagatgataaaggccgagctgaaagcgataaccaaaccaatcagatagctgacaatggcactgctttgaacgatagccaaaccgggaatgccggttaaaccaacggcggtcataccgacgtgattggcaaccacccaagcaccgcccagagcgccgccggctagtgcggccagaaacggcttcacaaagcgcaggttaataccaaagattgccgcttcggtaatacctagcatggcagagaaggccgacggcactgctatagccttgattttgacatctttggttttgaagtacaccgccagacaggcaccgccctgagcaacgttagccatcgaccaaatcggcagcagaaagttaacgccaatgtttgggttacccagtaatccggcctcaatcgcgtggaaactatgatggataccggtaatcactatcaccgaatacaggccgccgaacagcaatccggcaaaccagcctgcgtgggtgatcaaagtgctgaggatcattgaaataccgtcgccgagtacccgacctgccgggccgatgaacagcagtgcgataaaaccggaaatcaccacggtgaggaagggcgtcaggatcaaatccagcgcgttaggcaccacttttcgcagccgtttttccaccatgctcataaaccagaccgccagtaacaccggaaacacggtgccctgatagccgatcatggcgatttctaatccgaaaaaattcatggtgtggaagccgcccgcaacgccccaggcgttggtcagtgccggatgagtgagaatcccgcccaacgtggcacccaaataagggtttccgccgaactctttcgcggcggtaaagccaatcagaatcggcaaaatgatgaaggcggcggagctgaacatatccagcatgataaagatggcgctgtcggcgtcggcccagccataggttttcaccatccccaacagacccattaataggccagaggcgacgatagccggaataattggcacaaaaatattcgacagtaaacgagcgacccgttggaacggattgagtttttttgcggccagatcggctgcttcagatttactggattcgtttacgccggtttgtcggataaattccgcgtgaaccttattgaccaaaccggtgccgaaaataacctgaatttgaccggcgttactgaagcaaccttttacgccatccagtttttcgatggcggatttttgtaccagattatcatctgccaataccagccgcagacgggtggcacagtgggcggcactgacgatattttccttgcctcccagcagcgggagcagagccgaaacggtctcagtcatgttcatttttttccctcattctatccagcaaagccgcgttcagattcgcatagcggcctttctcgtagcgatacattgttatttatatacagggtgactttatggtatgtccgccgtcattgcggttcgacggccagttattatcagaaccaggtttccatttgcacaccaaagttccattggccaccggcggtaaaatcatttttaccgaaagcatcctgctgagagtagttatccagatctttgctccagtccatataggtagcgaaaacgcgcagttccggacgactgaagaaattcccaatatcaccggctttaaaggttggtgcgaaggtcaatttatagaaaccgccgctgacatctttatagttgttgtagccccgtgggtctaaattcatatattggtaggtgccttcgtaggccagcgcaaagttttcggtaatttcctgaataaagcgggcgttgaatgtcacccatttatagctgtcaccttgaacataacgatcttcactctgctgagccataatcgccggtgccagactccagttcttgctgagcggcgtggtgccgtaggtggcgatacgccaggtatcggcgctttcgttgagattgccgtcggagccaaggccttttacttcggcacctaagccgtggccgtaaagcaccgcgattttagctgttccttcgcgcaggccgtagaagctgtcgccgtggtaggccagcatagcgtggaagcctttctccgctgcgttatcgctggcgacaatgccgttgattttccgctgatcgttatccttggcacgcaggccacttagcatgaactggaatgggccagcgaagttattggcagtgaaaatgtagttctggatgtcatcatcgatgccttcaatggcaccgaaattacgaccgtaaagtgaaaagttgcttttcagatcttcattccatttcacatcgtaaataccgccgccggtgccgccgaggaataccacatcgctatccaaccagtgaatatcaaagttatcccgatcgaaacgtttaccggcccacagagtactgtccttgaatatgcctgtgaaagtcggcagagagcctaattccacgaaagcctgacgcacattgagtttgctgttattgccggtccaatcgttatagtcgcgctgaccgtctgccagcatcgctttaaagcgagtcgttgcgccgtttgacagagtctgttttttctccagactcagctcaacgtaagtatcgggttcgttgcccaaacgcccaatattgccgccggtactgcctgctggcgtaacgtccgggccgccttgggtacgggcaccattactattcatcagcagcccggaacgggcatagccgtggaactcaaagccactttctgctggcgttttgctttccagcttctcagtgcgcttagccacttctactgttttttcttccgcctgcgcggtgcgtgcttctaattttttcgcctgtttttctgcaatttctgctcgtgcttcagcctgttgcgcccggcgctctgcctggtgtaagcgttgttccaacgcatttaagcgcgcttcaatgtcactggtggaagctgccgtaacgctggtggccgagcatgagagaataagtccaatagttacagcgagatagctaggttttatcatcatttttatatcactcgatatgtgattcgttgttatttgctaaacagctaaaccggtttttcatggctaacataatggagttaaccctgagttagcaaaacattttgctaacccgtttcagccattgtgatccagcttacaaatcgatcgtttcaaacggagctggccgggtttttagccataaaaaagcgcgccgggatcggcgcgctggagaagtcactcaatgagaggggggttaaagcgaggtcattacctgaataccgcagactcctgtggtgctgaatgttcggtttcatcggcggcgacccatttataaatatcaccgcgctttttgctggcatatttgatttttacccaagttttatcggtgttttccagaacggttaaatccacgatcgcgacttgatcgcctttcaccagatacatcgctgatttctgagctttgttcggtgcattatacagacgtaacttttcatttttcactgtataaacatagggttcaccttcaatcccaatagcctgttggctgattttcttaccttgaggatcgtagtatcgttcgaaaaaagcgaaggttgaaatgtcgtgatcgggagcaacgcccatgtttaattccatatccgaggccagataaagcttcccttgatcatcgtatttaaatttgtcgctataccagactgggccgccacggcaggatgaaatgatggttttgtttttctcatccagcgtcacatcggaaaactggccgcaggcgccaggattattcggttttagtgctttaaattggcctgcttcaggctgccagaggtagatgaaagtctcaaaattcaccatgccgaccggcacatcgatggcgatatcgttataaccatcgaagttgaaatcagtgaaactggctcccggatttttaccatcatcaataaattcaaaaccgcccagttcctgagtttttccggagggtaacagcacctcgaaacgcccgccgtcgctatttgatccttcaaactgctcaatagttaattgccctttatggtctttatcaataacaaaaggtgttggtgtagcaaaagctgccacgggtaagacgctgagcagcaagaccgcagacaaagatttcacgttgagttcctttcagaaaagaaaatagcgggcaggtaggttcagacaggaaatatatagtggggttggaggaaaggcaaataagcggttactgccgaataactacgataaaacagagagatccggcaggtatcagcgggctaaaccggggtttttaaaaaatgagccagttggctggagcttggcaacgcggtcatcgcgcctttggccgtggtcgccagtgcgccgcaggcttgagcctgagcgattgcagcgggaagatctgtgcctttggcccagtcttgctggtcagccagggcggccagcagcccggcgacgaaggcatctcctgcgccagtagtatctaccggagtgactttgcggctcggatattgctgcaaatccgtgcgattatgcagccatacgccatcagcccccagcgtaaccaacagcagtttgcacgggaagtgtgccattatttgctctatagctagggtggtttcatcggttccgctgataaatgccagttcttccagcgacagtttgactacgtccgccaattgtagcgcctgatgcaggcacggcagcaattcctccggattttgccaaatatcttcccgaatattaggatcgaagctgacccaaccgccggcggctttgatacgcttcatcgcttcaaatgcggtgcttcgactgggttcacggctgagcgcaatggagcaaacgtgaagccactgatgggcttcaaattccggtaaatcatcgggttgtaggaataaatcggcgcttggattgaccataaaagtaaaggatcgctcgccgtttcgatctaaatccaccaccacggttgaggtgtgatagtgaggatcttgcgtcatgtagcgggtatcgacattttcctgctgcaatatctgctgcataaagcggccaaagctatcgttgcccactcggccaataaaggcgcttttaccgcctaaacgggcaattcccacggcgacgtttgccggtgctccgccgggacatttaaggtaactatttgaattatcaggcaccagatcaaccacggcatcgcctaaaacccacactgaattcttcatgatgatcctcaaatttatccgatcctattggtggctaaaattagaagaatcggtttagcaaagcaacaaaattcctgaagtaatcagaaaaagtgagtcataacgtgatctaatcgattttattgcagtgagaaatattgggtagtttaaaaacaaaagatatggattatcattagcgttcgaatcttattatgcatttatcaaggatatatcatgtccgttagtcttctccgcgcagcccgctggctattggcttcgctggcgatccttatgtcctggtctgcgttggctgcacctattgtggttaccgatgtggcggggcgtgaagtgacattgcctcagcccgccgccaaagtcatgttggctgacgccagagccttgctggcgctgaatattttgcatccgcaaacgccgctaaaaaatattattgcttgggataattcgctaaaagtcaaagcgccagatctggtagaggcttacgcgaagacattccctgaaatcaataagattcctatttttgaaaacccctacgtttctgattttagcgtggaacaagcggtagttttcaggccagatctaataatttttgatattggcttgctggaaaaactgaaaagcagcggcgtgttagggcagttggaaaaagccggactgccggtattaatcatcgatttccgtcagcagccgctcaccaatacggtgccaagtatgagattactcggcaaagtctttggcgaagaggcgaacgctgaatcctttattcagttctatcagcaacgtttggatttggttcgtgagcgggttgcggccttaaaaccagagcagcgccccagcgtgtttatcgaacgcagcgccggaatgaaaggcgatgattgttgcagcacttttgggaaaggcagtttcggacaatttatcgatgttgcaggcggtaataacgttggaagcaagctgtttccggcaatgggcggagacgttaacgtcgagcaactgattgccagtaacccggatttttatctgatgaccggcgctgactggagtcgcgggcaccgaggtactttagcggttccgctaggttatagcaccgatgaagctaccacgcaggcgcgtctgaaacacctgatgaatcgcaccggcatcagcgtgctgcaatcggtcaaagataagaaggttatggcgatttatcatcagttttacgatacgccgttcaacgtgattgccgttgaagccattgctaaattcctgcatccggagctatttagcgatcttgaccctctggcagatatcaagatgttgcatcaaaaatacaccgcgctggattacagcggcgtgttttgggttcaggctaaataattcctgccacgctcatttctcctgctaatcctccccttacgggaggatatttctgagcctgttctattgaggcaatattatttgccattttgaatattcgctctgctcaaatggcttgtgcgcgtcatgtttgtttgtggttttctacgtaaacctttgccggccaagacttcgactgaaataaactctgattcgatttattgccaatatcgatttacttggtaagcagaatcattaagattagcgtttctaaaaaatacattcatatacatttcctttcggaataaacctcatatgtttacttttactcgtctttccttgctagctgcatccattgcgctggcattgcctacctacgccgcggataaaaaaactcaggctgatgataaccagccaacggccactcaggatgcacccgccacgggtaaaagcgacacgctttcggtagtgggaaactggttggataacaccgataacagtacggttgtgctgaatcatccgggggcgcgaaccatcgtcacccagcagcgtttgcaggaaaaaggtgcgcagactatcggtgattcactgcgcggtattcctggtgttcaggtgcgcgaaagcaacggtactggcggtagcgatatttctcttaacgttggcgttcgtggtttaacttcgcgtttgtcaccgcgttccaccattttgcaggatggcattccgctggcggtggctccttacggacagccacagctctctatggcgccgttatccatcggaaatctacagtctatcgacgtgattcgcggcggcggtgcggtacgttatgggccgcagaacgtcggtggaattattaacttcaataccaaagcgattcctaaagagtttagcggcgcggtgagcgcgcagactcagggcgctagccacggcggcctgaaaaccctatccagcgcttctttaggcgggacggcggataacggcttcggcgcggcgttgatgtactctggtttacacggccaggggtatcgcgatagtaacgacaataccgacatcgacgattttctgctgaaaactcgttatgaaatcacgcctaatgatgagctgttggccaacttccattattacgaagcccacgccggtatgccaggcggcctgaccagtgcgcaatatgcgcaaaaccccttccagtcgactcgaccattcgatcagttcgatggccgtcgccgcgatatgtctttcaaatataagcatcaggaagaagataagcagtttgaattactgacttatttcaccaaaagcttccgcggtagcaatattgaatctgaaggcactggcaataatgtgggtaaaaaacggatggttgcctatccgcgcaattacaccacttgggccattgagccgagttattcccaattattccatttaggcagcacttcccatgaggtgacggtaggctatcgttatctgaatgaaaccatggacgagaaagcatatcgttctgtctggtatgcaccgagttcagcgtcttctacaccggcgacgccggattactaccaacacacctctggcggcactgaagcccacgcggtgtatatcgatgatgcggtaaacgttggcaactggacaatcactccgggcctgcgttatgaaaaaatcagcactaacgtcgatgattctttctcacaaacttctcgtgagaagcattacagcgagccactgccatccctgaacctgatgtatcatctgtctgatgaatggaagctgtttgctaacgcgaatacctcttttggcagtatgcagtacttccaactgagcaaaggtggcaacggtaacgcgcccgcgccgggtctgaccgcagagaaggcgcatacctacgagattggtactcgcttcgacgacacacttctcaccggagaagtgacgctgttctacattgatttcgataaccaactgcaatacatcagcaacgatatcggctggaccaatctgggcgcgaccaaacatcaagggattgaaatggcgttcagttacgatttgagtgaattgaacccgacgctggacggtgtgagcgtttataccagctatacctacaccaaagcgacgaccgaaggcggcgcgtttgcgggtaaagatctaccgttctattcccgccaggtatataccgttggaacccgttaccagaccggaaactggacttggaatctggatagctatgcgcaatctaaacagcgttcaccggggagcggcccgatttatattaccgaagaaagcgccgacggccagtttggtaatattccgggttatatggtgtggaatactcgcgccgaatataatttcgggccacagtggtcaaatctgacgttaggcgctggggtaaaaaacctatttgaccaacgttatttcactcgttcaaatgataacaattccggcaaatatgtcggcgagccgcgcaccttcttcgtgcaaggttctgtagcattctaaagccgttcacccggccaaatactggccgggtttctgatagtgtttcgagcaatttttcctgctccgcaatttcctttcgctatttcgtgcagccatcctttcaaaaaaattatgcctgaaacagcagaaataacattctataaaaatagttactaaactaaattagccgcgtttagatagtcaaaatatacctcgagcgcgataagttacgtgaattattttcacaataaaccgactgattcattccaataaactcaacgcatttttaatgtacttatttaatggtttgtatgactaaataaattttttatcccgtttggcgtggtgaaatccaatgtctgcggggagcgctctggtatttaactggcagggcaaatacatcgccccacaggaaagagatagtctggctgacaaccgatatttagtggacggattccgcggtagcgagcgtatcgctggcgaaagcgactttattgcgaccgtttttcttggcttgatacagtgcttcatccgcggctttcagcgaagctggcaaatccaagggttgcagcggtgaaatgccggcgctgagcgtgaccgtagtggatactttatgattgaaaacgtggggaatatccagccctagtacgcgctggcgaacgcgctccgccagctgtgaggcgtattcttcgctaacgtgggtcagcaataccagaaactcttctccaccgaagcgcaccacgatatctcgtgaacgcacagcatcgcgaatggctgcagcaacccgcaccaaagcctgatcgcccatggtatgaccgtagttgtcgttataggccttgaaatggtcaatatccagcaacaaaacataatgattacccggcgactgcgttagcaggctttccagcttactttccaggccgcgtcggttataaagattagttaatgggtctatcatgcttaaatcactgaatttttctcgttcattatataaatgggcgaccaattttcgggtgaattcatcgctgcggcgcagcataagatgatgtaagcaaaaaccaatgagtggcagcataacagtgaatataatgcggaaaatattctggaaatcgtccagaaaaatcacggcaatcgccgctggcgctgaatgtaaacaaaaggcgataaagttatcggaaagcgcgatagtgctgataaagaaaattgtaaacaggctgatcaataagaagttattttcgtctcgccccaaatattcatattttagaatgatttgccatgtccacagaataccgagaataaatgcgaatatattcagtttattcgcataatccttcgaaaaaaatatgttaaataacaatgcactaatgctgagaatagcaatcaataccaccggcaaagtaaatgctggagtgtagtgagccggtaataacatattaaaaatagatgaagacgcatttaaaaataaaaagagcagtaaagagagccgatgcttacttttcaatagctgatcgtaggaatggccgttcatattaaattcactctgtgtatgtaatgctgtccgcagacaaataaacaatatcctcatgccgcctgatttaaggggcacgataaatagtttttctttgaaattattctgatttaaatctttttaagatttttcttaatacaaaattaccatctttggatcggcatgtcatcatgatgtcgagctgctacgcaaaatgatgcacttaactacagagtgttatatgatattggttatcattatcacttagtgtgggggtattatcatgattggagcgacaatagcagcctgccggtcgtggaggctgaacgatttcttactgagtcgaatggccagcggatggggtgttttactgccttgtgcgcttttacctttgctgggttggggggattttagcgtgaccgaactgcgtggcattattgtcgccgcgatgttggcaacgttgagtatgctgtaccacccgcgcctgcgccattttctgttgattccttcctgcctggcaatggctggcggtctactcgcagttttgacacatctatgaatacgggctgaatgacggcgtatttagggcaaaatagggaagtttttttgggaagataaccaagtgctttcgagcgagtaccgctaagtgagctatagccacatgctatatcacttgcacataccaagaagggagaaaaccgaggaattcaatcagtgtggtgcgaagggagggacttgaaccctcacgtccgtaagaacactaacacctgaagctagcgcgtctaccaattccgccaccatcgcacatctgattgtttttactgctttaatttatgtcaccagcttggtgcgaagggagggacttgaaccctcacgtccgtaagaacactaacacctgaagctagcgcgtctaccaattccgccaccatcgcatgatgctgtgtaacataaatcttgtgattgtttggtgcgaagggagggacttgaaccctcacgtccgtaagaacactaacacctgaagctagcgcgtctaccaattccgccaccatcgcgtaccatgttcatcacttttgtgatgcaaccacgggggcgaattctagagattttcctgttcaggtcaatacttatttccctttatcgggacggttgctgtaaaaaacagcatatccgcagttattcggctgattcattgagatatcgggcttttcagcgctatttttcgtcagcattactgatgagttcatcggaaattaaaagctttctcatcaataagaagcctgaaatatgtgagagagttcgggttgaaaggcgggcaaagtacggaataagtgagtaaacggtgtttacgccatgcggcagcggctatgcgctgcaacatgacgtgctgatcttgaaaatttcaacgttagcgtattcaaacgccaaattattacagtatcagattattaacgtttggcttttgcgcggggagcgcggccaacggtcgcctgataaaccttaaaacgaccattttgtgccagtacttcatggctgccaaacgcggcatccagcagcgccggataaggcaggaaagagttagccacaatgcgcagcttgccaccaacgtgcaaatgaccggttgcaccacgaatgagcatttctgccgcgtggaaactggtttgtaacccatcatggaacggcgggttggaaatgatcatatcgaaacgcccctgaatgtcagagtaaacgttactcgcgatcacttcagcttcgatttcgttggcagccaaggttgcccggctggcttcaatggccgctgcgctaacgtcgctcagagtccatttaatcttcggtgactgtttggataataccgaagccaatacgcctgcaccgcagccgacgtccagcacgcgacctttaaaaggttcgttgaaggtggagagcagcaggtagctgccggaatccagcgcgtctttactgaacacgcccggcagggttttgatggtgacatcatcaacctgatagctatgccaccagccttccggatcaaattcaggctgtttatctaaacgcgcatggtacaaaccgcagcggcgcgcgctgtcgattttggtcaacgtggcaaaatcactcagcatttcttctgcgctacgtacgccacagcggttttcaccgacgataaaaatatcggtgccgattggcagcatagacagcagattagccagttggaactgagcttcttgcttgctttttggccagtagtaaatcagcgtatcactttgcgccagaaaatcggcgtcagccagcagaccgaattgaacattgtcttccagcgtattgctcagtaattgccagtggtgatattggttagtgtgaacacgcacctcggcggcttcgaactgcgccggtaacgcgtcctgtaggtcgcctgcaaaaatcacgcggcgttgaataaactcatcactatggcgcagcatcacttcactggctggggttaatgcggacatcagtcgttggctccttaataatatgatcggggattatagaggtttgttggcgcatattcgatgtgtttgctagcatagcgccgaaacacgggtatcttgacaggaaatagcatggcatcaagacgagactggctattgcagcagcttggcattacgcagtggacgctacgccgtcccgccgtgttgcaaggcgaaattgcagtaagtttacccgaggatattcgcctgcttattgtggcggaaacgctccccggtcaggacgatcctttgctgtgtgatatcgtgcgcagccttggcctgagtgccgctcagatatatagcctgacgccggatcaggtggcgatgctgccggaagatacgcagtgtaatagttggcgattgggtatcagcgagccgcttgcgctggccggtgcacaattacacagcccggcgttgaccgagctttatcaagatgcgggcgcgaagcgcgcactttggcagcagatttgtcaccatgaagcagatttctatcctgacgccagccgatctggccaccgcgtatcagattgagcaagccagccacgaatttccgtggacggaaaaaaccctgttcagtaatcagggcgaacgttatctcaactataagctgacggtcgatcagcaaatggccggtttcgcgattacgcaaattgtattggacgaagccacgctgtttaatatcgccattgatccgcagcatcagcgccaaggctacggccgcttactgcttgaacatttgattgaacagttggagacgcgtgatgtagtcacactttggctggaggtaagagcctcaaacgcccgcgccatcgcgctgtatgacagccttggctttaatgaagtatcggtgcggcgtaactactatcccagcgcgaatgggcgcgaagatgccattatgatggcgttacctttggcttaaagccggtttcgctgtcgcaggtattttcatcgattgtctatcccggttaaatcagggaaaatatcgcgctataacactgattctcgctttcctgaatcatgcatgactccgagtgatgccagagcagggcggcccaaagtagaaatatctaactatgtctccaagtgaatatgcacaagaagtggcgaaaagacgtactttcgccattatttcccaccctgatgccggtaaaaccaccatcactgaaaaagtgttgctgttcggacaggctatccaaaccgccggtacggtaaaaggccgtggctccaataaccacgccaaatccgactggatggaaatggagaaacagcgcggtatctccatcaccacctcggtgatgcagttcccgtataaggaatgcctggtaaacctgctggacaccccggggcatgaagacttctccgaagatacttaccgtactctaaccgccgtcgactgctgtttgatggttattgatgcggcaaaaggggtagaagatcgtacccgtaagctgatggaagtgacccgcctgcgcgatacgccgattctgacctttatgaacaaattggatcgtgatattcgtgatccgatggaagtgctggatgaagtggaacgcgaactgaaaattgcctgttctccaatcacttggccaattggctgcggtaagttgtttaaaggggtttaccacctctataaagatgaaacttatctgtaccagaccggtaaaggccacaccattcaggaagtccggattgttaaaggcctgaataacccagagctggacgttgctgtaggtgaagatctggccaaacagttccgtcaggagctggaactggtgcagggcgcttcccatgagttcgatcatgaggctttcctgaccggtgatttaacgccggtcttcttcggtaccgcattaggtaactttggcgtggatcacatgctggacggcctggtttcctgggctccggcaccgatgccgcgtaaaaccgacgtgcgtgaagtggtggcgtcagaagagaaattcaccggtttcgtatttaaaattcaggccaatatggacccgaaacaccgtgaccgcgtggcctttatgcgtgtagtttccggccgatacgtaaaaggtatgaaactgcgtcaggttcgtaccaagaaagacgttgtgatttctgatgcgttgacttttatggccggcgaccgttcccatgtggaggaggcttttgctggagatatcatcggcttgcacaaccacggaaccattcagattggtgataccttcactcaaggtgaagatatgaagttcaccggtatcccgaactttgcgccagagctattccgtcgtattcgtctgcgcgatccgctgaagcagaaacaattgttgaaaggtctggttcagctgtcagaagaaggtgcggtacaggtattccgcccaatctccaacaacgacctgatcgtcggtgcggtaggggtgctacagtttgaggtggtatcttcccggctgaaaagtgaatacaacgttgaagcagtatacgaatcggtcaatgtttccaccgcccgttgggttgagtgcaacgacgtgaagaaattcgaagagttcaaacgtaagaatgagctgaatctggcgctggatggtggcgataatctgagctatatcgctccaaccatggtcaacctgaatattactcaagagcgttatccggacgttattttccgtaaaactcgcgagcattaatctcagctgtatcccttataattcggggcatccactgccccgaatctttagttttcctcatcatttatacctctaagattcatcctactaatcttccgatgttgcccctttaggcggattcctactgtctttttttatctgtggtctatatttataagcgtgttaggcaatcgttcagataaaaacagtattctgaatcaatcagttaagcttttgtttgttcattgccaaacgacaggtttaattctgttaaatcagtcagtaagcgaaaatgtgctctggattaagcgttattgtcagttgtagcaggcagttttgcttcagtttgttaatccggactttgtttatggctgaatttaatggtgttttaggcaggcatcgcaattgtggattgcaattgcagtatgtctgaccgagcaagctcaatttttgcccgtttggaaatattgaagctacagtaattgtgaagtatccattgagtgagccacgaaaacggtggcgaaacaactgacactgactggcttcacaccaaaaaggaaaaatcgatgaaaaacactacatttgcacgttcagtgatggctgttgttttaggttctgcgttggttagcggaagcgtaatggctgaagacactttactcaataaagcatccagcacgatagacagcaccggtgcgaaaatcgatagctccatgaaaaaagttgataattacatggatgagagcgcaactacggctaaagttaaaagtgcattagttgaggataaaactattaagagcggcgatatctcggtgaaaactgaaaatggcgttgttgttctgagtggttttgtatccagccaggctgaagccgagcgtgcggttgctgtcgcaagcaaggtagaaggcgtgaaatctgtcagtgataagctgcatgtaaaagatcagaaaacacaatcagttggtgaatatgccggtgacgcaaccacgaccagcaaagtaaaagccaaactgttggccgatgatatcgttccatcgcgcaaaattaccgtagaaaccaccgctggtgtcgtcctattgacgggcgacgtagaaaataaagcgcaagctgagcgggctgaaagcatcgcgaaagccatcgacggtgtgaaaagtgtaaaaaacgatctgaacattaagccttaatacttccacagacggtctgtggagtagcaggccgttctgaagagcttaaaacccagagttgacccgttagtcgttgctgaagcgctctatggatggggctttttgaagctacaaataccacagtaagcgtgttgttcagcactacagcgggtcaattttattgagatacggatggaaggagagggcttatgtttcgttggggcattatttttctggtaatagcgttgattgctgcggcgctgggtttcggtgggttagccggtacggcggcctgggccgccaaagtggtattcgtcgtcggtatcatactcttcttaatcagtttgtttaccggacgtaaacgtctttagctagcgtaggaagatttttacattcttgtttttatgctggaaagccgctgtcattaacagcggctttttaatgggccaaatgaagctatttaagaaaccaccaatagcgaattaagacgacatcattagcaaaaagagtctgtttttccgatgttaatcggtgatttactgggcgtaaaactggctatcagcaatgattctttacaagaagattaacgaaagcgcgtaagacaagctattctcggggtctattgctactcactaaggatggatggtgggacacagaatacctatcacgctgggcaatattgagccattagcgtacaaaccctatcagcccgggaaaatggcgttggtatgtgaagggggcgggcagcgggggatttttaccgccggggtgctggatgaatttcagcgagcccgctttaatccattcgatttaatgataggtacttccgccggtgcgcagaatctatccgctttcatctgtgaccagccgggctatgctcgtcgggttatcacgcgttataccaccagtgcgaatttctttaatcctttgcgctttgttcgtggcggccacctgatcgatctcgattggctggtcaatatcacctctgagcaattgccgctagctattgatcatgcggaaaagcatttgtccaatggacgtgaattcttgatgtgcgcctgccgcagcgatgatttcacgccgacttatatcgcgcccaatagagaaaactggctgccggcgattaaagcctccagcgccattcctggattttatcgttcaggggtggaaatggatggaatcagttatctggacggtggtatcagcgatgccataccggtggaggaagctcatcgtcgcggcgcagataccattgtcgtgattcgcacagtgccttcgcaaatgtattacaccccgcagtggatgaagcgcatggagcattggtttagcgaaagcagcctgcaacaaatggtgcgaattatgcagcaacacgagcatagctatcatcgcattcaaaagtttattgaaaagccgccggggaaattacgggtgtttgaaattttcccacctaagccgctagccagtaacgctttgggcagtaaaatagcttcgctaaatcgggattatcatttgggacgccgctgtggtcgttattttttagcaaccgtgggccactggttattgcctcgagataaaaggccggatgataagagtaaggtggttttctctcgtcgtttaattaaaccccgccatgacattcagcctgaaattgtagcctcgtcattgctgactgaatcgggtcaatttgctgaaacggggaaaatcttacccgccgagaatatgccgttagcaaaggggcttattttaccggctaagcttagaaataaagtggcgcaggtgatttctgatttcactccaccggtcaaagcaaaaaaatctaaaggtgataaggcgtaatgtcaggttctaacagcagcgcagcttattttattgatactcactgtcatttcgattttccgccgtttagcggagcggaggtggctagtctgacatcggctgcgcaggcgaacgttcggcaaatcattgtacccgctgtagaagccgaatatttcgatcgcatacaggctttagctaatgattatccggcgctgtttgccgctctgggaatgcacccgctgtatatcgacaggcatcaggagccgcatctgactttactggatcagcggctgtcgcagagatcgccaaaagtggttgcagtgggcgagattgggctggatctgtatatggaaaatccgcagttctctcgccaattggcgttattacaagcgcagcttaaattagctaaacggtatgatttaccagtgattttgcattctcgccgcactcacgatcaactggccgcggcgctgcgtaaagccgatctgccgcgcaccggtgtagtacatggttttgccggcagtctggtacaagcgcaggcgtttattaaattaggctattacatcggcgtgggtggcactattagctatgagcgagcgcagaaaaccagaaaagtgatggccgagttaccgctggaagcgctgttgctggaaaccgatgcgccggatatgccgctggccggttttcagggacaaccgaatcgccctgaacgcacggcggacgtgttcactgtgctgtgtgaattacgatccgaaccagcggatgtcattgcgcagcagctttatgccaacagtgtgcgtttgtttaatcttcctccggcgtaatacctttcatttcaccgcgcagttgtgctgactacctccattcatccccgagacttagtcggctaagctcccaaccactcactcagctgccgcgtggctgcaacgaaaaatgaacggatggctaacaacgggctgaacgtcattgaagcccctgaatgagttacttagcgtggtaacatcctaactactaataacggctataattatgtgaatctgatcacgtttccagtcatttggttgcttctttgtgtgtttatttgtgacagggattgtttgcgatttgagccatgacgctataatccccccgaattcaaaaaagaaatatgtggtctgaacgcatattaaatcgtgtcattctccatttaatacatacacagggaacatcagatgcaacccatcatgagtttggtcgggatggcggtactgatattaattgctgtcttactctcgagtaactttagggctattaatatccgcaccgtcgtaggcgcttttattatccagattggcgtcggagcattggttttgtatgtgccgatcggtcgccgtattttgggcggaatgtccgaaggcgtagcgaatgtgatcgcctatggtaacgaagggatttcatttattttcggcggactggtctccgacaagatgtttgaagttttcggcggcggtggctttgttttcgccctgcgcgttctgccggttatcgtctttttctcctcactgatcgcggtactttattacctcggaatcatgcagctggtgattcgcgtactgggtggcggcctgcaaaaactgctggggacttcccgcactgaatccctgtcggctaccgcgaatatcttcgttggtcagacagaagcgccgttggtggtacgtccgtacatctctaccatgacacaatctgagctgtttgccgtgatgtgcggtggcctggcgtcggttgcgggttcagtattggcgggttatgcgcaaatgggcgtgccgttggaatacctgattgccgcgtcctttatggccgcgccaggtggcttgctgtttgccaaattgatggtgccggaaactgaaaaaacgcacgatcacgaagatgcaaccaagctgattcctgaagccgatcgcccagcgaacgtcatcgatgcagcggcaaccggtgcggcttccggtatgcaattggcgttgaacgtgggtgcaatgctgttggcattcatcgcgttaatcgctttgttgaacggcattttaggcggtattggcggctggtttgattatccgcagctctcgctggaattgattctaggctgggtattctcgccaattgctttcctgattggcgtgccgtggagcgaagcgacggtggcgggttcctttatcggtcagaagattatcgtcaatgaattcgtggcctttatgaacttcggtcagtatttgaaagccgatgagttggttattgccgctggtttgccagtactttccgatcataccaaagccattatttcttttgctctgtgcggttttgccaacctttcatccgtggcaattctgttgggcggtctgggcagcatggcgccgaatcgccgtcatgacattgctcgtttcggtttgaaagcggtggcagcagggactttatctaatctgatgagcgccaccattgccggtttcttcctggctctgtaattcatatcgatttgtaaaatataatattctgcaaaggtagattgtttgtagaatagcgtgctggcggggacggttatcacccgccagcctgtttttcccttccggtgactcaggccgtttgtgcgtattgtcatcaccgtcgtcgcacggaattagatgaataggctattcttgatgcgagagcgaaagatagtctgcacttatcgataaatcaggttattttgtgactcaattcacatataattcagacctgttacaaataactattaattaatgtgagtattaacacatctcatttgagcgcttcatgctcaaatagagacagctggcttttcttgtggaaaagctaagtgcggtgagatggatctcagttgccgctgcgggagcaaatcccaagggcgctatcttcaaggaaccaagtccgctcgccaacgtgttgagctgcatggcctggaatttccataggaaattgccgtcagttcataaatgaatgctcggttttggcgcggtgccgaagctgaaatagagttggagagttttatgaccgatttaaccgccagcgcgaaacgtgcgctcagtttgatggatttgaccactctgaatgacgacgataccgatcaaaaggttatcgatctttgtcatcaggcaaaaacccctgcgggtcatactgcggctgtctgcatttatcctcgttttattccgattgctcgtaaaacgctacgggaacagggtacccctgagatccgtattgccacagtgaccaatttcccgcatggcaatgacgatatcgacattgctttgaccgagacccgcgcggctattgcctacggcgccgatgaagtagacgtggtgttcccatatcgcgcgctgatggctggtaacgataaagtgggcttcgagctggtaaaagtgtgcaaagaggcctgtgccgccgccaacgtattgctgaaagtcatcatcgaaaccggtgaattgaaacagcaacatttgatccgtcaggcttctgaaattgcgattaaagcgggcgctgatttcattaaaacctcaaccgggaaagtaccggtgaacgcgacgctggaaagtgcggaaatcatgattcgcaccattcacgatttgggcgtaggcaaagaagtcggcttcaaacctgctggcggtgtgcgtactgcagaagacgcggctgcattcctgaaactggcggacggtatcatgggcgaaggttgggcggatgcgcgccatttccgcttcggtgcatccagcctgttagccagcttgctgaccactttaggtcatcacagcacagccaaacccggcggttattaattattgcagatgcacgacgggcactgcgcccgccgtgttgctattgctgaaaaggcacaatgcgcttttcgatttcccattcaggtcaagcagggggatgccttgtttctggcacaagaaattattcgtaaaaaacgcgacggtctgccgttgagcgaagaagaaattcgtttcttcatcaatggtattcgcgacaatgttgtttccgaagggcagatcgccgctttggcgatgaccatttattttcatgatatgagcatgcctgaacgcgtggcgctgactatggcaatgcgcgattccggtaccgtgctggactggaaaagtctcaagctgaatggccctattgtggataagcattctaccggtggcgttggcgatgtgacttcgttaatgctcggcccaatggtagcggcttgcggcggttatgttcctatgatttcaggccgtggcctgggccataccggcggtacactggataagctggaggccattcctggctttgatattttcccggatgataatactttccgtaagattattcaggatgttggcgtcgcaatcatcggccagaccagttcattggctccggcggataaacgtttttacgccactcgcgatattactgcgaccgtggattccattccgctgattaccgcttctattctggcgaagaaactggcggaaggcctggatgcgctggtgatggacgttaaagtcggttctggtgcctttatgccaacctatcaactgtccgcagatttggcgcaggcgattgtcggcgttgccaacggcgcgggttgtaaaacaacggctctgctgactgatatgaatcaggtgctggcatccagcgccggtaacggtgtggaagttcgtgaagccgtacgcttcctgaccggtgaatatcgcaatccgcgcttgctggaagtgacgatggcgctgtgcgtcgaaatgttgctttccggcgggttggcgaactccgaaaccgatgcgcgcgctaagctacaggcggtattggataacggtaaagcggcagaagtctttggtcgcatgattgcggctcagaaaggcccgactgatttcgttgaacgttacgacagctatttgccggtggcgatgctgagcaaaccggtctttgcagaaaaaccgggcattatcaccgcgatggatacccgcgcgctggggatgtctgtggtagcgctgggcggcggtcgtcgccgtgctaccgattcaatcgactacagcgttggcctgaccgatatggcgcgtctgggcgataaaatggatagcgaacgtccgttggcagtgattcatgccaacaatgaaagtgactggcagcaggcggctgatgcagtacgcgcggccatgacgctgggtgacaaagcgttagaacaaacgccggtggtttatcgtcggattaccgaataagctttctttattcactacgaatttggcgcagtaaggcatgttggccgtactgctcccacagcgtgagttcacgcaggagaaaatgatgaaacgtacatttattatggtattagactcatttggtatcggtgctagcgctgatgctggcaagtttaacgatgaaggtgccaacaccctcggccacatcgctgaagcctgtgcccgcggtgatgctgatattggacgtaaaggcccgctgacgttgccgaacctgagccgtttagggctgggtaaagccgctgaagaatcctgcggtactttccctgtgggtctggataaagatgctgacatcattggtgcctatgcttacgccagcgaattatcttccggtaaagacactccgtcaggccattgggaaattgcaggtgtgccagttctgtttgattggggctatttcagcgacgttgagaacagtttcccgcaggaattgctggataaactggttaagcgcgccaacctgccgggctacctaggcaactgccattcatccggtactgtaattttggatcagttgggcgaagaacatatgaaaaccggcaagccgattttctatacctctgctgactcggttttccagattgcttgccacgaagaaactttcggactggatcgtctgtatgagctgtgtgaaatcgctcgcgaagagttaaccgaaggcggctacaacattggtcgcgttatcgctcgtccgtttatcggcgacaaaccgggtaacttccagcgtactggtaaccgccacgatctggccgttgaaccgccagcgccaaccattttgaaaaagctggttgatgagaaacagggtgaggtggtttctatcggcaaaatcgccgatatctacgcacacgtgggcatcactcacaaagtcaaagctaccggtattgatgctttgttcgacgctactttggaagaaatgaagaaagcgggcgataacgccatcgtctttaccaacttcgtggatttcgactcttcttacggccaccgccgcgatgtggcaggttatgccgccgcgctggaactgttcgatcgccgcttgccagaattgctggaattggtgaaagatgacgacattatcatcttcaccgctgaccacggttgcgatccaacctggccgggtaccgatcacacccgtgagcacattccagtgctggtttacggtcccaaagtgaaaccgggttctctcggtcatcgcgatactttcgctgacatcggccagaccgtcgcgaaatattttgatttgtcaccgatggattacggcaaaccaatgttttgattatctgcgtcggaccgtttatggcggtcgaccggtgattttatttaatatttttgatttataaggaaaataattatggctacgccacatatcaatgctgaaatgggtgattttgctgacgttgtcctgatgccaggggacccgctgcgagcaaaattcatcgcagaaaccttcctgcaagacgtgcgtcaggttaacaatgtgcgtggcatgctggggttcaccggtacttataaaggccgcaaaatctcggtaatgggtcacggtatgggtattccatcctgctcaatctacgcgaaagaactgatcaccgatttcggcgtgaaaaaaatcattcgcgtgggttcatgtggcgcagttcgtaacgatgtaaaactgcgtgacgttgtgattggtatgggtgcctgcaccgattccaaagttaaccgtctgcgttttaaagatcacgattatgcggctatcgctgatttcgatatggtgcgtaacgctgttgacgccgctaaagccaaaggcgttccagcacgcgtcggtaatattttctccgctgatttattctatacgccagacccacaaatgtttgatgtaatggaaaaatacggcattttgggcgtggaaatggaagctgccggtatctacggcgtagcggcagaatttggtgctaaagcgctgactatctgtaccgtttctgaccatatccgtaccggtgaacaaactaccgcagaagaacgccaaacgaccttcaacgacatgattgaaatcgcgttggaatctgttctgctgggcgataaagagtaatagcccgggctacaatttcttctgagccgcacactccgctgcggctctttttttatcaatactttctgtttctctgtttctttctatatgcgtcaacaggttccagatatcacccctgaacattggctacaagcgcagcgtttggttgagatattttggcttcgagtggctgatcattcagctatctgtttggaattcagtgcgatagcattgccaaatgcaggaaaagttggctcactcacgccacgtatccaacgcatggcctgaacctactttttgacctgcgattcctcggttctttccgtagatttgctggcagttgaatccgcattggatgattcccctgattcgctgtcttcttctaccggcgtattggcagtgagcagataaggcgattgctgccagcggctacggcgatgctgcaataaggttctggccagaataataccgaccgccagcgcgaccagaatcattaaacgcagtaagttggtggtgttatccacctgcttggattcggttgccagtacgtgggtatccaacgtcatgcgcaaaaagccgctaggcccgttcttgccgggaatcatctccacaatctgatgattgaaataactgccggggcgtttgccgtccagcgccaaccggtcacgcactttgactttttcgccagaatccgcgaccaaagtgccgtcaatcaaatacacactggcatccagtatgcgactcgcctgcgtcaactgtttcaggacttcatcgaccttctggctatccacgtcgtcattgttgctatccataatcggagacaggctaaaagccacctgtttcgccagcgttttcgccagctcttccacctgttcggagcgtgccaactggtggctgaggctgaaataggatgcgccctgcataagcagcacaagcaaagctagacaaatcagtacgatagcagtgcgatgcagtcgaaattttaatttagcccgggccatgcaggttccttacgcgttttgatgactttatgttgccagaagcaaggacgataggatagcttgatgcatcgtttttacccttcatctttctcgctgctgcggtgttggctgcttttgctcaccccagtcgcttagtgggctaagctcctgaggattcgctcagtcgctgcttggccgcaacgagaaattattgggcttatatcgcagctttgctgtgatgtgaggctattgggtatatattgccgattctgggtttctacaggagcttttcatgtcaaatagtctgacctattgcgatctccccgcggagatttatcagtggcccggtttgccgctttctttgagtggtgacgaggttatgccgctggattatcgtgcgggccatacgggttggctgttgtacggcagaaagctggataaacaacgtattaccgattttcaacgccgtttgggcgcggcgatggtgattgtctccgcttggtgcgtcgatgactatcaggtgattcgtctggctggtagcctgacaccgcggattaaaacgctggcggacgaaagcgggctcgatgtggctccgctaggcgcaattcctcatttgcgtacgccgggtttattggttatggatatggattccacggctattcagatcgaatgtattgatgaaatagccaaattagccggcgtgggcgacgaagtggccgctgtaaccgagcgggcaatgcaaggggaactcgatttctctgccagcctgcgtcagcgggtaggtacgctgaaaggagccgatgccaatattctgaaacaggtacgcgatactttgccgctgatgccggggttggtcacgctcgtgaagaaattacaggcgctgaactggcatgtggctatcgcttctggcgggttcacttattatgcggaatatctgcgggataagctgcatctggacgcggtagccgccaatgagctggaaatccgtgacggcaaactgaccggtcaggtgctgggcccgattgtcgatgcgcaatacaaagccgacacactgattaaactggcggaaaaactgtctattccgattcagcaaaccattgccatcggcgacggtgccaacgatctgaaaatgatgcaggcagccggtttggggttggcgttccatgctaagcctaaggtttatgctaaagcgaaagtggcgattcggcacggtgatttgatgagcgtgctgtgtattttaagcggcagtctgaagcacgaagaacgctaattccctacgtttctggcgtgctcgctcagtttgccgtcacgccagtaaaccgtaggaaaataggcggttacaacgctaaaacctattgaattttaaatttattgttagatcgtaatacagaggaaaagacgtggctaaagcaccaaaacgcgcatttgtttgtaatgagtgcggcgcagattatccgcgctggcaggggcagtgcagtgcctgtaacgcctggaataccattaccgaagtgcgtctggctgcggcaacgccttcttcgcgtaacgatcgcctcggtggctatgcgggcgaggcgggtatcagtcgggtacaaaagctgtcagatatcagtctggaagcgctgccgcgtttcaccaccggcttccttgagttcgatcgggtgttaggcggcggcgtggtacccggcagtgccattctgattggtggcaaccccggcgcggggaaaagtaccctgctgttacaggtattgtgcaagctatctgaaggcatgaaaaccctgtatgtcaccggtgaggaatcgctacagcaggtggcgatgcgagcgcatcgactcggtttgcccaccggtaatctgaatatgttatcggaaactagcatcgagcagatttgcctgattgcagagcaagaacagcctaagctgatggtgatcgactccattcaggtgatgcatatggccgatattcagtcctctcccggcagcgtggcgcaggtgcgtgaaaccgccgcttatctaacacgttttgctaaaacacgcggcgtagcgatagtgatggttggtcacgtgactaaagacggctcgctggccggtccgaaagtgttggaacactgtatcgactgttcagtgatgttggatggcgacggcgattcccgcttccgtactcttcgcagccataaaaaccgctttggtgcggtgaatgagttgggcgtttttgccatgacggaacaagggctacgtgaagtcagtaatccatcggcaattttcctcagccggggtgatgaagtcactgccggtagctcggtgatggtggtgtgggaagggacacgtccgctgttggttgagattcaggcgctggtggatcattcgatgatgtcgaatccgcggcgagtagcagtaggattggaacagaatcgactggctatcttgctggcggttttacaccgtcacggcggcctgcaaatgtcggatcaggatgttttcgttaacgtggtcggtggggtaaaagttacggaaaccagcgccgatttggcgttattaatgtcattggtatccagcttgcgggatcggcccttaccgcaggatttagtggtatttggcgaagtcgggctggccggtgagattcgcccggtgcccagtggccaggagcgaatttccgaggcggcgaagcacggttttaagcgagccatagtgccgcacgccaacatgccgaagaagcctctgccgaatatgcaggtatttggcgtgaaaaaactggccgacgcgctggcggttctagaggatctttaagctgcatttagtcgtgttgtttgagcagcatactgtgttatttttgtttagcgtgctaaacaggaggcagtatgctgcagttcgattatttaaaaacggcaatcaaacagaaaggctgcacgttacagcaagtggccgaagccagtggcatgaccaaaggatatttaagccagctacttaacgataaaatcaaaagccccagtgcgcaaaaacttgaagccctgcatcgttttcttgggttggaattccctcgccgcgagaaaaaggtcggcgtagtgtttggtaaattttacccgctgcataccggccacatctatttgatccaacgagcctgtagccaggtagatgaactacatatcattctgtgccacgacgaacctcgggatcgggaactgttcgagaacagctccatgtcacaacagccaacggttagtgaccgtttgcgctggctgctgcaaacgttcaaatatcaaaaaaatatccgcattcactcatttgatgagcacggcatcgaaccctatccgcacgggtgggatgtctggagccgcggcgtaaaggcctttatggcagaaaaaggcatagtgccaagctttatctattccagcgaaagtcaggatgcgccgcgctatcgcgaacagtttggtatcgaaaccatcctgatcgatccgcagcgttcatttatgaagatcagcggccgtcagatccgccgtgatcctttccgttactgggattatattcctaccgaagtcaaacccttctttgtccgtacggtggcgatcctcggcggggagtccagtggaaaatcgacgctggtgaataaattagccaatatattcaataccaccagcgcctgggagtacgggcgggattacgtattttcccatttgggtggcgatgagatggcgttgcaatactcagattacgacaaaatagccttggggcaggcgcagtacgtggatttcgcggtgaaatacgccaataaggttgcatttatcgatacggacttcgtcacgactcaggcattttgtaagaaatacgaagggcgggagcatcctttcgtgcaggcattgatcgatgagtatcgcttcgatctggtgattctgttggagaataatactccgtgggtggccgacggtttacgcagtctggggagtacttccgatcggaaatccttccaaagcctgctggaagatatgctgagagccaataacgttgaatatgttcacgtggaatcggcagactacgacgagcgcttcctgcgctgcgttgaattggttcagcaattgctggccgccgatccactgcgattatcccgctcaccgatcagcgagcggaacagtctgcagaatgataattaataagcgataaccagcttgccctgcatgcgtccagtcagtactttttggtgcgccgcgtgcagggtgtcagtcgtcaggccgtgtaaagtatcactcagcgtgccgcgcagttctcctgcgtcgacatattgagcgacctgtttcaatatttctccctgttgcgccatatccggcgtgttgaacatgctgcgggtaaacatcaattcccagtgcagagcggcacttttcagtttcaacgcgctttgatcgaggggatgagtattttccacgatggtgcaaatgtggcccatcggtgcgatgaggtcgccgatcgtcgcccagtgaccgtcggtgtcattcaggcagaaaatataatccaccttatcgatcccattactggccagttctccttttagatcgcgataatcgacggtgagatctgcgccgcgatccagacaccagcttgcagagactgggttcgaggctgtggcgatcacgttaacctgactacgcagcgccgccagtgagatggctatcgatcccacgccgccggcaccgccaatgatcaacagggttttccccgctggcgcttcctgaatttttagatgctcaaatagcccttcccaggcggtcaatgcggtcaacggcatggcagcggcttctgcccagttcaggcgattcggtttacgcgccacgatgcgggcatcgaccaattgatgcgtggcgttgctgccaggacgcgtcagatcaccggcataccagacttcatctccaacgctaaaaccctgtgtcgagctacctacgccaatgactacgccgctggcatcccagccgagcactcgcggctgctgtaagccatttttttgtagaccggcgtggactttggtatccaccggattaaccgatgcggctttcacttccactaagagatcgaaagcactgggcgttggctgatcccacgggatctgaatgaaatcggcgggtttctgcggattaactgcaatagcgtaatgagacatagcctagctcctttttaggtagaccttgagtttagatccgattgactagagtgataagatggacaatcaataactcagtgttcgtctatggtgaacaattatgtttaagcagctacaggatatggcgctgtttgcgcgagtggccgaatgcggcagttttaccaaggcggcggccatcgccggtttacctaaatccagcgtcagtcagcggattagcctgttggaacaccggttgggtatccggttgctgaatagaaccacgcgtcagatcagcctgacgttcgccggtgaacgctatttggttcactgtcaggaaatgctacaggcggcggagcgagccgatttaaccctacagcgcttgctggataatcccagcggccgactgcgagtttccagtccggcagggctggccgccactttgctggcgcggattgccacggattttcaacgacaatatcccgatgtttctctcgaggtattggtctccgacgttaaagtggatttggtggaagaaggcttcgatgtggcgttgcgcactggaaaaccgcaggattcttcattgattggacgccgcttgggctatgcgccccgcaatttactggcttctcctgattatctgactcaatttccgccgattttacatccgcgtcagttggaggaacatcgttggattacccaccgcgcttggccagaactggtattaaatcatcaggatgaatatttccgttggcagttacctaagctacacgtcaccgataatttgctctacgccattgagtgcacactatcggcgggtggaattaccttgctgcccgcttttcttagtcgcgaaaaggtcgcgcagggaaaattagtggaagtgttgcctgaatggctggccgaagggaatgaactgtatttggtttatcccagccggaaattaaattcaccggcattgagctgttttattgatgtggttatggggcatccggtatttacccattatgcccaaggattaacgtaatatttttggtgcgttggctaagtgagagcattactttgcggcagaagtgggaagcgcaacaatatcgttaaaatcggtcccaaaccaatagacgccataatcgctccagtgtgggccttcaataaaatccatcagcgaaacctgttcggtgtgaaaaacctgaccggcctgattttcaattttaatgtagccgctgtaatgagagccgtcgccgggcgagccaatagagggaatcaattgggtaatcttataaaagcgcataacgtattgatgattgggactccattcttccctgaccagagtgccttgttgccaccaaaaatagactgctccacccagaataaacaaaaatagcgtccatcggattttgcggattcttattaattttttcagtgcttcagagattgaatataatttcatttgctatccatgcgtcaggctaaaaaaatactgcccaccaaggtgagcagtatttagcagtgaatgacgaattacttggtcattttcttgtacttaatacggtgcggttctaaggcatcagcgcccagcgtccgctttttccactcttcgtattcagtaaagttaccttcgaagaattctactttcccttcatcctgataatcgatgatatgggtagcaatacggtcgaggaaccaacggtcatgggaaataaccatcgcacagcccgggaattccagtaaggcgttttccagtgcgcgcagggtttcaatatccaggtcgttggtgggttcatcgagcagcaacatattgccgccaacctgcaacaattttgccagatggatacgaccacgctcaccgccggacagctcgccgatgcgtttgccctgatcgacacctttgaagttaaagcgaccaacgtaggcgcggcttggcaattcaaagttaccgatcttcatgatgtcctgaccgccggaaacttcttcccacacggttttgctgttatccatgctgtcgcggaactgatcgacagaggctaactgcacggtttcacccaaggttatggtgccggaatcaggctgttcctgaccggacaacatacggaacaacgtagatttacccgcgccgttcggcccgataataccgacgatggcgcctttcggcagtgcaaaggtcagatcgtcaatcagcaggcggtcgccataggatttgctcaggttctgaacttccagcactttgtcgcctaaacgtggaccaggtggaatgaacaactcgctggtttcgttacgtttttggtattcaacgctgttaagttcttcaaagcgagccaaacgtgccttgcctttagcctgacggcctttcggattctgacgaacccattccagctctttctcgatagatttacgacgagcggcttcggaagaggcttcctgcgccagacgagcgtctttctgctccagccatgaggagtagttgccttcccacggaataccttcgccgcggtcaagttcgagaatccagccagccacgttatccaagaagtaacggtcatgggtaatcgccacaacggtgccttcatagtcgtgcaggaagcgctccagccaagccacggattcggcatccaggtggttggttggttcgtccagcagcagcatgtccggtttttccagcagcaggcggcagatcgccacgcgacgacgctcaccaccggacagattggcaattttggcatcccaaggcggcagacgcagcgcatcggcagcgcgttccaactgattatccagattatggccatcgtgagactggataatcgcttccagctcgccttgctctttcgccagcttatcgaagtcggcgtctggatcggcatacagcgcgtagacttcgtccaaacgagtcagcgcgcgtttaacttcgctaacggattcttctaccgcttcgcgtaccgtttgttccagattcagttgaggttcctgcggcaggtaaccgattttcaggcctggttgagcgcgcgcttcgccttcgatgtcggtatctacaccggccataatgcgcaacagggtagatttaccggaaccgttcagacccaatacgccgattttggcgccggggaagaagctcagggagatgtttttcaaaatatgacgcttcggcggaaccactttgccaacgcgatgcatggtatagacgtattgagccacgttgctctagcctctctatatcagtttttattaggatgtctggtgcggagtgtagcccgtttcgataacggatcccatacatccttgaagataacggagtataacctttttgcgggagaggcgggctgaccgcccccacagaatgggcttattcaggtatcagggcgcggtgacgaccattgccacgcgacggttttcggctcggcctttggccgtgcggttatcggcaaccggatttagcttaccaagcccgcgaacttcgatattggctttcggcataccgatggaagtcagggtatttgcgacggcgctggcgcggccataagacagttggttattgtaactatcttcacccattgaatcggtgtgtccgtccagacgaatatggctgataccaacgtccatcaaggcgtggccgattttctctacggtttgctctccctgagcattcagtttcccaacgttgctgctaaatagcaccttatctgacaggccaaattcccaaccgttgtccgttagtttgaatccctgttcctgtagagccgctatttgctccgctgtcagaccctgaggcttattctgacaacccgctagcagcaataaccccaacgccatcaagccaatccacaggctactcctcaacttttgcattgtaagaccttattcttttacgctgtgtatgtcaggctttggggcagaatcacccggccgcctccatgataattgttcttcgccaaatacatggcctcatccgcacgctgtaacagttctactggcgtttgcgcgtgttccggatagaacgcaataccaatactgattgatgttgtgatatccgtgccgtcaggcagtgtaattgggtgagccatacaatgaatgatattgtccgcgatcgataatacatcatagctattgccgattgacgtcagtagcacggcaaattcgtcaccgcccagacgagcaacaaaatcagtttcacgtaattgcgaacggatacgttcagccatggtgatgagtacgacgtcaccggcggcatggccataattatcattaatctctttgaaactatcggcatcgaggaacatcaatgccaccatatccttatcagcgcattcattgagcgtgcggttcaggctgacttcaaaaaaggcgcgattggcaagcccggtcaggctgtcatgagtcgctctatgggtcaggaaatcattttcctgcgttaaatgtgcctgccagacttccagctcttccagcagcccattgaaatcgttacttaactcattaagttctttgatatgagccgatggaactctttggccaaagctacgatgcaggctcacatcgtgcgccacttcggttatacggttcagcgagccgacaattctgcggagcattcggcgagaaaggaacagggcgactagcgtgctggcaatgataccggctagcatggcaatcaccccgcgcaacaggaaactgagcaggctgccgccgtggccgacaataataatggtacctatgcgttcaccgctgtgcatgataggcagttctaccgggccactcagtgcccaatgggcaacgctttgctctagctggtggaacgggccgtgggcgggtagcgaccaactggctattagcttgccattggcatcaactattttagcctcggccacctcttcgctggctgcaatcaacgccaatgattcattggcggcaatattatcgccgaaaactacggcggcttcggtggtatagctaattgaacgggcgatcaaatgcaggttgtggtcggcgtaaacacgcagggaaaaaatggcaaccagagtaataaagataccagccatccccacggcaaccagagccacggttaaatgtatgcgttgaagtattttccctaagctaggtaattttacacgacgtttatttattcttttaatcagtctcataaaccatcagccttcttacgggcgagttgcagtacgctcggatgaacacgaactcctgtacgtgctaacgcatccatattaaccttaaaagatgcctggttatcttccactaacagacaaaaggcgctgccggtggcgcattcagaataatcctcactgattgtcagtatcggatgaccttgagtgcgattaattaactccaaccgctgctctgcggtggcacttcccaaataaatagcatcgcattggcttgaaatagccgggctggcaaacgggaatcgctcgactttaattggatgttgcgttgccattaacgccgggttaaacaggccttctgcatagttggtcggggcgacaacacataacctaatgacctgcggagtcaccggccagcgggcatagctgataatccccaaaaccattttggttgcggcatctgtccgcgcctgtatcacgttcgcattggcaggttcttccgccgatctggcgccggtagaaaatacgaacgtaaatacaatcaatagatactgacaaatacgcccaaaatgccagggaggcataacgtattgatcattcttactgacgccgttgattgcgcaagtcgaggtggtcatttttgcgcttcctgtggatcggccccggaaatataaacaggcaacatagtcagtgagaaaaagtcattttattatcggcgcttagatttaccgtttttattctctctgattgtattacaagatcacattgttgcaatgctcgtcatggtatcggcagggcagggaattttcttaaatattttcatttcagggaaaaaccgcccggttttaacaccgggcggagaaagaaagcgggaaatggtcaaacagactttatggaaggtttaaaacgctggataacccatttctctatttcaacaataatgaagatggcaagacccaccagtaatgtcaggccccagtaataggctggcagaggttcggttccaaaggctgtgttcataaacggcagatagataattgccagttgcagcaagattagaacgccggaaaccagccacagacctttgttaacgaacaactctttgttcagcgggaagcgatccgccacgcggcagttaaacatgtaaatccactgcgcggtaaccagcgtttgcatgagcactgtacggataaattcggtgctgtaacctcgaggttccagataagcttccagaataaaggcactgatagcaatcaaagtaccgacaaaggcgatacgccagatagcgtggccgtccagtacatggcgcgaaggatctcgcggattgcggttcatgatgcctctttctgccggttcaaatgccagaccgaaagaaagcgtagtagaggtcgccatattcatccacagaatttgcagcggcgttaacggaatgaccgccccggcaagaatggcaaagatgattagcagcccctgcgccaggttggttggcaggataaacaggatggttttcttcaggttatcgtaaacccgacgcccttcttctaccgcactggcgatggtggcgaagttatcatcagagagcaccatatcggcagcttctttagtcacttcggttcctttgatccccatcgcgatacccacatccgcctgtttcagcgccggtgcatcgttgacgccatcgccggtcatgccaacgatttcacctttggtttgcaacgcttttaccagacgcagcttatgctccgggctggttcgggcgaagatatcgtaacgaaccgcggcttcggccagttcctcatcgtccatatgttccagctgactgccggtaatggaatccgtgccgttgcctattcccagcatcgcgccaattgccatggcggtttcctgatggtcgccggtgatcattttcacgcgaataccggcctgctggcaggtggctatcgcatcaatggcttcagggcgcggcggatccatcatgccggcaataccgacaaacaccataccctgttgaatatcggcatgatccagtttgctaatgccctcgtcagtaggtcggaacgccgcagccaccatacgcaagccctgcttggcgtagcgagccatttcagcttcccagtaatcgcggcggaacggagcgacgccgtttgccgtcagttcctgctggcagaaggtaaatagtacgtccggcgcgccggtcaggaagatgctgttttccgactgaatctgatggctggtggccatatatttataagcggaatcaaaaggaattttaccgagttgattaacctgacccagctcaatgccggatttcgccgccagtacttttagcgccccttcggttgggccgccggtaatcacccaatgaccctgatcgtttttctggatctggctgtcattacataaattcaccgcagtgatgaatgttttcagcgttgggtttgcagctaaatcggcctgctggtcgctgccttcctgataaatattgccaacgggctcatagctttcaccttcaacgcgatagcaatggtcggccaaaattaccgctttcacggtcatttcgttcattgtcagggtgccggttttatcggaacacaccaccgtcattgcacccaaagtttctaccgttggcagcttacggataatcgcccgtttacgcgccatggactgaacgcccagcgacaaaataattgagataatcgccggtaagccttccggaaccgaggccacggccagactgatcagcgccagcaacagttcatcaaccggcaggtcgcgtaggataaaggcaaaaacaaacagtacggccatcatcaccagaatcaggatgaagatagctttaccgaggcgatccatttgctgcagtagcggagttcgggtcgattcaacggtagacatcatctggttgatatgacccagctcggtgtcaccaccggtggcaataaccacgcctttggccgtaccggcgctaatggtggtaccggaaaacagcagatttttacgatcgccaataacggattcgctttctatgactccggtttgtttttccaccaccgtcgattcgccagtaagaatagcttcttcgatctgtaggttgtggccctccagcaaacgcaggtcagcaggaattttgtcaccgggtttcagggtaacgatatcgcccggcaccagatcttttgcatcaatggtttgcgtaatgccatcgcgaataaccacggctttactggaaagcatgttctgaatgcttttcagggatttctcggccttattttcctgaacaaaaccgatcagggcgttaatgaccgcgacgcataagatgattatggtatcgacggaatgccccatcagtcctttaaccaaggctgcggcgagcaggatataaatcagaacatcattaaaatgggcaaggaattggaggaggggatgcttgcgtttcttttctggcaaggcattaggcccgtgcttttttaggcgttttgctgcctcctgctggctcagaccttctgtagtggtattgagctgctctaagctctcatccgtcgtgagctgataccaggttttgcccgatgggggcggcgaggctgacttttggtttggtgtgttatgcattgaaggaaccttctccaaagaattaataaatctaaaattagccgtccttgtgtcctttatttaccggaaaataatgccggtttaacgtcaagccaaaataccttttgccttacgctgtgaacacctataagttaattatttgatttttaaataaaaattaaatgctaatgggttgaacagaaacagtgaaacagcatagttatagtgaggaaggatagtagataattatcagtttactgccttgatctgagataataaaaattaagtaacagaatgttcctataggcgcagaacctgagtttaggcgcgatttttgctactgatatctctacagttacttgcgttatcgctaaaaaatttaacacccaatctctcagcttcattggtaatttatttcgttcagcggataagatgaatatgaatagccactattataaaaaggttattattccgttcgtattcctaattatgtgcttatcttcattaagcaaaacgtggattcttcataataagaatatctgcaaaagtgggtaaagacgctggaacatagtggcatatcgagcgaaactctcagccagcctgaatttgaagctctgaactaattatgactatgctaatcagaagatccggtgaatatgacgtacagccaacaaccagtgaggaaacagtaagtatggataagtggcgatacctggcgattggcgtgtgtctggtgacagcatcaggagcggcgtcagcagattctcttgatgcccaacggcagcgctatcaacaagttaaacaggcgtgggatagcaaccagatggcaacggtggaacagctgttaccaacgctgcgcgattatcctttgtatccctatctggaatatcgtcagttgacgcaagatctcggccaggtcagcgcggcacagatcagtgatttccttaaccgtaatccaacgctgccgccagcgcgttcgttatcctcgcgttttgttaacgagctggcgaaccgtgaagattggcgtgggttattgagctttagcccacagccaccgaagccggtagcggctcgttgtaattattactatgccaaatgggcgagcggcgagcagcaggtcgcctgggacggtgccagcgaaatctggttgaacggccagtctttaccgggtagctgcgacaagctgtttacggtttggcagcaggcagggcaccaaacaccgctggcaacgctggcgcggatgcgtttggcgctcaaggaagggaatgccagtctggtcaacttcttgctgaaacaattaccgagtgattatcaaaccatggggacggcgctggcgaagttacagagcgatccggccagcgtggaaagctttgcccgcaccgtagggccgacagattttacccgttctgccaccattattgcttttactcgcttagcgcgtcaggacgtggaaaacgcccgcgccatgattcccacgctgacacgactacagaagatgagcgagaaagataaactggagctggaagaggcggttgcctggcgtttgatgggaaatgatgccacttacgagcaggcgaaatggcgtgatgaagtcacgttgcgcagccacgccacgccgttgcttgaacgccgtattcgcatggcgttaggcaccggtgaccgtaaagggttacaggcatggctggagcgtttacctgcggatgcaaaagataaagacgagtggcgctactggcgtgcaaccttgctgattgagcagggaaataaagccgaaggcgaggcgatactgcgtgagttgaccaaagctcgcggtttctacccaatggtggcggcacaaaagctgaatataccttatccaatcatggttgaagtggcgaccaaacccgatacctcattggcggacagcccggaaattgctcgggttcgcgaactgatgtactggaatatggataatctggcacgtaacgaatggagctatctggtcgccagccgtagtaaaccgcagcaggaagctctggcgcgctatgcctttaaccaaaagtgggccgatctgagcgtacaggcgacgatagtggcgaaactttgggatcatctggaagagcgcttccctctggcctggccgcaagaattccgtcgggcaacggaaggcaaaggcattactccaagttatgcgatggctattgcccgacaggaaagtgcatggaacccgaaagcgcagtctcctgtgggagccgcaggtttaatgcaggtgatgccacgtaccgcagatcatacggtaaaactgaataatatcagcggctatgtgaacagcagccaattgctcgatccggtcacaaatatcgaaattggcaccagctatctggaagaggtctatcagcagtttggccgcaaccggattctcgccagcgcggcgtataacgccgggccatcgcgagtgaatacctggcttggaaatagcgcggggcagatcgatgccgttgctttcattgaaagtattcctttctctgaaacgcgcggctatgtcaaaaacgtcttggcttacgacgctttctatcgtcactttatgcaccgtccggcaaaggtgctgagtgatgcggagtggcagaggcgttattgatttttgccagtttatgctatgctgctgtactagttaaatagtatggcagcataccatgaccgaaaatgtcgtaatcgatcccgctctttccgctgaagataaccagaactggttaagctttattgcgctgctgcaacaggccgttgcgcaagatcttcaccaaccgttgttgcaactgatgctgacgcccgatgagcgtgcggctttggggacgcgcgtgcgtattattcaggagttaatgcgtggtgaattgagtcagcgggaactgaagaaccaactcggcgccggtattgctaccattacccgaggttctaatagcctgaaagcctcgccaccgcagctgaaaagctggttggaagcgcaattactcaataacgaatcgtcgtcgcaatcctgaaacgattgaaacgtcaggtaaagattgagcctttgcctgacgctctattgcctaatcagctttccagatagaccgagttatggaaaggaactaaagcaagtactaacgcttgatggtaaacgctggtgcgtgacagtttaccatcggtaaagactccaatcgcaccaccctgacgtttcacttccgcattacctgtcaaaagtgccatttcgtcgcctagttcacgaccttgattaattccttgtaatataatttgcggtagcatcaaactggctgagcgggattctccccgctgctgcaagtgttcaacgactatccaggcaaaggtcatattatcttcgataccggcttcgaccccgacccaaaaatctgcttccggctttatctgacgtgctgcggcgacccgctggcgtgctccggtgcgggtttcgtcactgccaattggctggagggatacgccgctatcgacgttgataccttcgatatggcaggcgtctgcgccaaaaacatcgttgaaggcgagagtgatagccctgatctttgcagggttggtagttgcggcaacaacatggtacataatgagcttaagtatcctttagctaattttacgcagtataacggaaatcagacatgttacaggtatatctcgttcgtcatggcgaaaccgaatggaacgcggcccgccgtattcaagggcaatcagacagcccgctgaccgcaatcggtgaacatcaggctcgtctggtcgcacgtcgggtgagcagtgaaggtatcacccacgtcatcaccagcgatttgggacgtacgcgacgcacggcagaaatcattgccgatgcctgtggctgtgacgttattgttgagccgcgtctgcgtgaattgaatatgggcgtgttggaggagcgtggcatcgacggcttaaacgcgcaggaagaacggtggcgcaagcagatggtcgatggtactcctgatgggcgtattcctcagggtgaatccatggctgaactggcggcccgtatgcgtggggctttggaaagctgccttgagctacctccgggcagcaaaccgttgttggttagccacggtatcgcgttaggttgcctgctcagcactattttggggttgccgccccatgctgagcgacgcttgcgtttgcgcaattgttcgctatcccgcgtggattatcagcaaagtccgtggttggcatcaggttggatagttgagaccgcgggcgatatcacgcatctggatatgcccgcgttggacgaattacagcgttaacgtcggataggaatcagatattcgcagtgtaacaccttcggaggctggtcttgtggccggccctgagggaagaaacgttcgatatcatagcctttgcggcgagtcatctccgacagcggcaggcaggtaccatacagtgtcagaataaagtcctgtagcccttccgccggcccttcatagataaacttaacgtattcaccgccctgcaaaataaccggctggccttcagttacgttggctggagtatgttgaggctcaatggccgtggtgtagaatatctcctgctcatcatctttttcctgatttggccgggaatgatgcaagccgtacagtaccggcggcagcttatccgcaccgccaagatattgatgccagaaatgagagcgcaactcggttcggaacgtggaaatttgttccagcgtgcatgaatagctttgggttaaaccaaccaaatgctgttctggcaaggtaataaactcggcctgaggcagggtataagaccccaaccgaataggcgggcagatgcctaaggaatgccagtcttccgctcgacgatagagcgcaggcgtttgcgcaaactgttttttgaatgcgcgagtaaaggtttgctgggagtcgaaacggtattgcagtgcaatatccagaatgggccgactggttagacgcagcgcaaccgcagctttagatagtcttcttgctcggatataggcaccaatagcgttaccggtgacgtctttaaacatccgttgcaaatgccatttagagtagcctgccttggcggcgacattgtccagtgataaaggctggtctaaatgactttctagccagctaagcagatcacgaatgatactggcttgatccatagatcttcctcataaagcggcctggattaaagtaatagcttgagagctgaaaattagctccgccgcatagtagcaattttttttgtctcagactgcttaagatttttattagcaactgtgctaaataatgttgttaagctggcgaaagcttatttccaatgaatatcttattatcagtacaaaaatttaactttgcgtaatctatcgggtgtaatggagtaagtgtatgaaaaaaaattggatattgctttgcggactactttcttttggcgccatgagcgtgcatgcggaagaggttggctcggtggatacggtatttaagctgtttggccctgaccataaaatcgtcattgaagccttcgatgatcctgatgttaaaaatgtaacttgttatatcagccgtgcaaaaaccggtggaatcaagggcggattagggctggcagaggatactgccgatgcggctatctcctgtcagcaggtcggaccgattgagttatcagagaaaatcaagaaaggaaaatctaaaggggaggtggtcttccagaaacgcacttcgcttattttcaaaaagcttcaggtcgttcgtttctacgatgcaaatcgtaacgctctggtgtatctgacttattctgacaaagtcgttgatggttcaccgaagaatgctatcagcgccgtgccgattattccttggacgcacgccaacccataacgaagaattataagcaaaaaaaagccagcacttcagcgctggcttttttataaagttgataaccggttgattactcttccagatcgccacagaaacgataaccttcgccatggatagtagcgatgatttctggcgtatccggagtggattcgaaatgtttacgaatccggcggatggtaacgtcaaccgtacggtcatgaggtttcagctcgcggccggtcattttcttcagcaattcgccacgggattgaattttccctgggttttcgcagaagtgcagcatggcgcggaattcactgcgtggcagtttatagtgttcgccagcagggctgatcagtgagcggctattgatgtccagctcccaaccgttaaatttatagctttcaaccagacgacgctcttcgcccacgctacccagattcatggtgcgtgacagcaagttacgtgcacgaatagttaattcgcgcggattgaaaggcttggtgatgtagtcatcagcaccgatttccagaccgagaatcttatccacttcattatcgcggccagtcaggaacatcagcgcaacgcttgcctgttcacgaagttcccgagccaacaataaaccattcttgcctggcagattgatgtccatgataaccaggttgatatcattctcagacagaatgtgatgcatttcagcgccatcattggcttcatgaactacgtagccttccgcctcgaaaatgctcttcagggtgttacgagtgactatctcgtcttctacgatcagaatgtgcggggtctgcatgtttgctacctaaaattgccaacaaaatagaaataggaagtacagaagtctttgttacataggaatttttattgacttgtaactcgtcatcctatttatcacatgactaaagtacgtaaacgcgttcttgatgcactttccatcaacgtcaacaacatcgctagcttggtcggggtgttactccctacagccccaaaggtgacaaaagcggcgcatatcctaaccctattaacagcaacataacagtgtgagccgaatctaccacccaacaaaactacgctttgttgacatatatcaaattcaattgtagcacgttaacacttttgtgaaaaacacttacaagaataccagcttaagtgatagttggttaaaataactgatcgtttcagtgtatttaatattaaaaaaatcggtttatgtataggtgaataatttaatttgtaatgcattgatttttattgtttaaaatcaacatattctgagtatcagccgtcagtcatgattttcaacgttgggcctctctttcactcaatagataagataaattaccgtaaatgttatataaatgtaaacggcccgtccgttatatttacatcagcagcgttgcggtgaaaaacagcttattcacgtcccatgctccccagggaggtcacccgtagccaaacgtccttattgcctcgctttttccccctttggctctataggaacgaaagaaggaacgaaacacgctttctcattatttgacgaaatgtcaccgtcggctcgcacagaaaacagaaaaaatgctgctgtacatactagggataaaattcgcctgcctggctatatattccttaatttgtgattttatcggtttttactgcttttaatttcttttttatagaatttaaattctttgataccgatgcttaattccgcgagccagttaacaaaaaagtttgacttgggtcgactattgctttaaccaatagagggacagcttcaattatgaaatgagacagacagaaaacatgcgattcatcagcctgactacaacgattattaccaccaccgaaaccacaggttacggggcgggctgacgcgtacaggaaacacagaaaaaaagcccgcacctaaacagtgcgggcttttttttcggttcataaattcaggagagaatcagaaatgcgagtgctgaaatttggcgggacctcagttgcaaatgcggaaagatttttgcgcgttgccgatattatcgaaaacaatgcgcgtcagggacaggtcgcgaccgtactgtctgcgccagctaaaatcaccaatcatttggttgcgatgattgataagaccgtggcggggcaggacatctctcctaccatgagcgatgccgaagctatctttgccgatctgttacgcggcctgtcagaagcgcaaccgggttttgcctatgatcgtttaaaggctctggtttcccatgaatttgcgcaactgaaacaagtgctgcacggaatttccctgttggggcaatgtccggacagcattaatgcggcgattatctgccgtggcgagaagctatccatcgcgatgatggaagcggtatttcaggccaaaggttacccggtgacggtaatcaacccggttgagaaactgttggcgcagggccactatctggaatctaccgttgatattgccgaatctactcggcgcatcgccgccagtgcgattccaaacgaccatatcatcctgatggccggtttcaccgccggtaacgataaaggggaactggtggttttggggcgtaacggctctgattattccgccgcggttctggccgcctgtttacgcgcagactgttgcgagatatggactgacgtcgacggtgtgtacacttgcgatccgcgcaccgtgcccgacgccagattgctcaagtcgatgtcttaccaagaggcgatggaactgtcctattttggcgccaaagttctccacccccgcaccatcgctccgattgcccagttccagattccctgtctgataaaaaatacctctaacccgcaagctcccggcactttaatcggtggcgataacagcgatgacgcttatccggtgaaaggtattactaacctgaataatatggcgatgattaacgtctcagggccaggaatgaaaggcatggtcggcatggcagcgcgggtctttgccgtgatgtcacgcagcggaatttccgtggtgttaatcactcaatcctcttctgaatacagcatcagtttctgcgtacctcagggcgagctggcgcgtgctcgcagggcgctggaggaggagttttacctcgaattaaaagatggtgtactcgacccgctggacgttatggagcggctggcgattatctccgttgtcggcgatggtatgcgtactttgcgcggtatttcagcgcgcttcttctccgcgctggcgcgagccaatatcaatattatcgctattgcacaaggttcttccgaacgatccatttccgtggtggtgaataatgattctgtgaccaccggcgtgcgggtttgccaccaaatgctgtttaataccgatcaggttattgaagtgtttgtgattggcgcaggcggcgtcggcagtgcgttgatcgagcagatccaccgtcagcagccttggctgaagcaaaagcatattgatttacgcgtctgcgggattgccaattctaaagcgttgctgaccaatgtccacggcattgatttggcgaactggcaggagcaactgggcgcggctcaggagcctttcaacctgagccgtttgattcgtctggttaaggagtatcatttactgaatccggttattgtggactgtacttccagtcaggccgtggccgatcagtatgccgatttcttgtccgatggtttccacatcgtgacgccgaataagaaagccaacacctcatcgatgaattattaccgccagctccgtgctgctgcggctaaatccagccgtaaattcctgtacgacaccaatgtgggcgcaggcctgccggttatcgagaatctgcaaaacctattgaacgccggtgatgagctggtgcatttctccggcatcctttccggttcgctgtcctttatcttcggtaaactggatgaaggcatgtcgttatcagaagctacgctgcaagccaaagctttaggttataccgagcccgatccgcgcgatgatctctccgggatggatgttgctcgtaagctattgattttggctcgagaagcgggttacaaattagaactggctgacattgaagttgaatccgtattgccaccatctttcgatgccagcggcaatgtggaaagcttcctgaaacacctgccatcgctagacgcagagttcgctcgtcgggtcgctgatgcaaccgcgcagggcaaagtgttgcgctatgtcggcgtgattgaagacggccgctgtcaggttcgtatggatgcggtcgatgacaacgatccgttgtataaagtcaaaaatggtgagaatgcgctagccttctacactcgttactaccagccaattcctttggtcttacgtggttacggtgcgggtaacgatgttaccgcagctggcgtatttgccgatttgttacgcacattatcctggaagctgggagtttaattatggttaaggtctatgctccggcatcgattggcaatgttagcgtcggttttgacgtgctgggtgcggcggtttcacccgtggatggctccttgctcggcgattgcgttagcgtaacggcagcagacagtttcagtttgcagaatgaagggcgcttcttcagtaagctgcctgtcgatccaaaagagaatatcgtttatcagtgctggcagcgtttttgtcaggaaataggcaaggagatcccggtctcaatgcggttggaaaaaaatatgccgataggttccggcttgggctccagcgcctgttcggtcgtcgccggtttaatggcgatgaacgaattttgcggccagccactggataaggtcactctgcttggtctgatgggcgagctggaagggcgggtgtccggcagcgtgcatttcgataacgtagcgccttgctatctgggggggctacagctgattttggagcaagcggattgcattagtcagtcggtgcccggctttgacgattggctgtgggtgatggcttatccgggaattaaagtttctaccgctgaagcgcgggcgattttgcctgcacaatatcgtcggcaggattgcatcagccacgggcgtaatctggccggttttatccacgccagccacacgcagcagcctctgttagccgctaaactgatgaaagatgtcattgcggaaccttatcgtacgcaactgctgccgggctttgccgcagcgcgtcaggccgcacaggatattggtgcactggcctgcggaatttccggttccggcccaaccctgtttgcggtgtgcaacgaaagcgccaccgcgcaacgcatggcggattggctgcaaaaaaactacctgcaaaacgacgaaggttttgttcatatttgccgtctggataccgcaggcgcacgactattgggataacgcatgaaactctacaaccttaaagatcataatgagcaggtcagctttgcgcaggccatcaagcaaggcttgggtaagaatcaggggctgttttttccgctggaattgccagagtttgaactgaccgaaattgataacttgctagatcaggattttgtgactcgcagcagccgcattttatccgcttttatcggcgacgaaatagctcctgaaaccctgaccaaacgcgttaaagccgcttttgaattcccggcgccagtggctccggtcgaaaacgatgtctcgattctggagcttttccacggcccaactttggcattcaaagacttcggcgcgcgctttatggcgcagatgctggcagaagtagccggtgagcagcccgttaccattttgaccgccacgtctggcgacaccggtgcagcggtagctcatgcattctacggtttgaaaaacgtgcgagtggtgattctgtacccgcgcggtaaaattagcccgttgcaggaaaaactgttctgcaccttgggtggcaacattcataccgttgctatcgagggtgatttcgatgcctgtcaggcgctggtaaaacagtcctttgatgacgaagagttaaaacaagaactgcaccttaactctgctaactcaattaatatcagccgcttgctggctcaaatctgttactacttcgaggccgtggcgcagctgccgcaggaagcgcgtaaccaattggtgatttcggtaccgagcggtaacttcggcgatttgaccgcaggtctgctggcgaagtctttggggttgccggtgaaacgctttatcgccgcgactaacgctaatgacactgtaccgcgcttcctggttaacggtcagtggcagcctaaggctaccgtagcaactttatccaacgcgatggacgtcagccagccgaataactggccgcgagtagaagagctgttccgccgtaagatttggcagttgaaagaactgggtcatgcagccattagcgatgaagtgaccaaagaaaccatgcgggaactggctgaaatgggctatatctctgaacctcacgccgccattgcttaccgcgcgttgcgcgatcagctgcaagacggcgagttcggcctgttcctcgggacagcgcatccggcgaagtttaaagagagcgtagaagcgattctggcgcaggaattaccgttgccgaaagagttggctgtcagagcatcaatgccattgttatctcgtgatttaccggcagattacgatcaactgcgcgcgttcctgatggcattaccgaaataagctagcgcgttttgcaaaatacagcgaactaactaaagcaggaaagggccgattggcccttttctatatgacttttatatataaatagtacatcaatcagcttagtgctgctcgggtcgtttaaagaccagctcgtttttcgccgagagtcccgaatcgaactgatagccttccagattgaaatccaccaattgctcggttttactcaaccggttctgaatgataaagcggctcatcaacccgcgggcttttttggcgtagaaactgataattttgtatttaccgtttttctcatccaggaataccggtttgatcagcgtaccgttcagtttagccggctttattgctttaaagtattcatccgaagccaggttaatcagtacgttatcgccttgctgttccatcgcctgattcagtttctcggtcagggtattcccccaaaaggcgtataagtccttaccctgtgagttagccagtttggtgcccatttccagacggtatggctgcataagatccaacggacgcaacaggccgtataacccggaaagcatacgcaagtgcttctgagcaaaggcaaaatcttcttcgctgaaatcctgcgcctgcataccggtgtaaacatcgcctttaaacgctagaatcgcctgacgggcatttgccggcgtgaatttcggctgccactcgctaaaacgggcggcatttaatccagccaatttatcgctgattttcatcaggctggcaatctggggcggagtcagttcacggcaaatctcaatcagagcctgagactgatccaacaactcgggctgagtgtaggtttgggtagccaatgggctttgaaaatcgagagttttagccggagagataataataagcatgacgacatcctgtttatccagattggcacactgtagcaaaaagcgagcggtaaccaaacgaagaatggtcaattgctaagataggaagcatcgcgtggctaaatcgtctcagcatcatgataatgaaccaagttgttattaatccacggggttcaacgccttttcgcaggcgaaaacggttgctcggagaagtcggcgcgaccggtgtttttttaaacagttgaactgccttgcaccggggcttctgcgtgttattatcaagaaaaggctgggttgcagaatgccaaaagttcatgcacaaacgatgagaaacgacaacatgaccgataaacttacttccctacgtcaattgactaccgttgtagctgacaccggggacattgcggcgatgaaactgtatcagccgcaagatgccacgactaacccctctctgatcctgaacgcggctcaaattcctgaataccgtaaattgattgacgacgctatcgcctgggctcgcgagcaaagcagtgataaagcgcagcaagtcatcgatgcgggtgacaagctggccgttaacatcggtctggaaattctgaagctgatcccaggccgtatttctaccgaagttgatgcgcgtctgtcttacgacaccgttgccagcgtagcaaaagccaaacgcctgattaaaatgtacggtgatgcgggcatcagcaaagaccgtatcctgatcaagctggcttctacctggcagggcatccgcgccgccgagcagttagagaaagaaggcatcaactgtaacctgactctgctgttctccttcgctcaggcgcgtgcttgtgctgaagcgggcgtatatctgatttctccgtttgttggtcgtattctggactggtacaaagcgaacggcgacaagaaagagttcgcaccaaacgaagatccgggcgtgatttccgttaaagaaatctaccagtattacaaaaaacacggctacaaaaccgtggtgatgggcgcaagcttccgtaatattggtgaaatcatcgaactggctggctgtgaccgtctgaccatcgctccaactctgctgaaagagttggcggaaagcgaaggcccactggagcgtaaactgtcttacaccggcaacattgccgctgcgccagcgccgctgactgaggctgagttctactgggaacacaaccaagacccaatggccgttgagaaactgactgacggtatccgcaagtttgctgtcgatcagggcaaacttgagaagatgattgccgatctgctgtaattttataccggcaggcaacattgaacgaaaaaggtggcgtaagccgccttttttacgtctgaagctcgcctatttctgctctgtgacggaacaaaactatacttgattctgtgagttgagagggttgaggtaatagcgtcgcgtagtatcatcccgcccacagagaaagattttttcattgaggtcgttgtatgcatacattgcgtgtaggtttagtgtccatttccgatcgggcatccaatgggatttatcaggataaaggcctgccagcgttggaagactggttaaaaagtgccttaacgagtgaatttaccctcgaaacccgtttaatccccgatgagcaaacgctgatagagcaaaccctgtgtgagctggtggatgaaatgggctgccatttggtgttgaccaccggcggaacgggcccggcgcgtcgcgatgtgacgccggatgcgactctggccatcgccgatcgtcaaatgcccggtttcggcgagcaaatgcgccaaatcagtctacactttgttcccacagcgattttatcccgccaggttggcgtgattcgcaaacaggcgctgatactgaatttgcccggccagcctaaggcgataaaagaaacgctggaaggagtaaaagacgcggaaggcaacgtgttggttcatgggatttttgccagtgtcccatattgcattcaattgttggatggcccgtacattgaaaccaacagtcaggtggtagcagcattccgtcctaaaagtgccttacgtgatacaaaaatctaaattcatatagtttctgacataagataccattctaagcatgtgaggatttttgtacggtatagtaatttttactttacaaagagttgtaatatttttaactcaatactctggcttatcacggtgtcttatggatcaacagcacaatcgccgattgaatcggcaagattataaaactctgacgttagccgctttgggcggagctttagagttttatgacttcattatctacgtattttttgccgcgattatcggtgaactcttcttccctcccgatatgcctgagtggctacgtcaggtgcagacctttggtattttcgccgccggttatctggcgcgaccattgggcggcattatcatggcgcacttcggcgatttggttggtcgtaagaagatgtttagcctgagtattctgttaatggctttgccgacgctggccattggtctgctaccaacttatgccactatcggtattgccgcacctttgttactgctgctgatgcgcgtattgcaaggcgcggctatcggtggagaagttccgggcgcctgggtatttgtggccgagcatgtaccgcgtaaacgcgttggttttgcctgcggcaccttaaccgccgggttgacggcgggcattctgctaggctctctggtggctgcggggatgaaaaccaccataagcaccgaggcaatgatgaacggcggctggcgtattccattcttcctcggcggtattttcggcctgttcgctatgtatcttcgccgctggttacaggaaacgccgatctttaaagagatgcaggcgcagaaagcgctggcagagggtttgcccttgaaatcggtcgtggttaaccataaaaaagaaatcgtggtttcgatgctgctgacctgggtgctgtccgctggaatcgtggtggttatcctgttgacgccaacctatctggaaaaacagtacggcgtgatgtcggcgctggcgatgcaggcgaatagcgtggcgattgtggcgctggtctgcggctgcatactctctgggctggccattgatcgctttggcgcgagtaaaacctttatcgtcggcagcgtgttactggcggtagcgacttggtcgttttatcaggctgatttaaccgatcctgtcaagctgttcactcattatacctttgctggatttagcgtggggattgtcggtgcggtaccttatgtgatggtccgggcttttccggcagaaatccggtttactggaatttcattttcctacaatgtggcatacgccatttttggcgggttgacacctattttggtcacgttattgatgaaagttacgcctatggcacctgcctattatatgttgctgttatcagtggtcgggttcctgttggggatatatttacgtaatgatattaatagtgatctgaatgtacagttgtcaaagagggttctggctgagtagataaccgccaattagatgattattctaaataaatagcccatacatcatgggctatttttaactcgtataatttaaaattcgtgcttgaaattaaaaccaactttttgcttaacacgagctgagggttgcgaaataacttcagaaaataatgttctagcgccttgttgttgtaaatatcttgccagcgctctaaccgctgcggtccccgctcctctgactgtaccgtcgcgatcgggaaataggacataatctggtagtgttgctgatgcaaccagttcaacttcatctttgctgttaaaacggtcggcaagaacaaccgcgataatttttccctgtagtttgactaccacatagatttcaccggggcgttgaagccttaatctacgatggataatacctgtaacgatatgcccagcatggaggagtctactgagggcgctgttattttcatttgcgccggaatccgcgccgaaatccgcgttggaatctgcactggaatccgcactggaacctttgatatcttgttcgatatgcgttccttggtactgcatcccccattgcgcgatagtttcactcagctttttacgcatggctcgagcattcttaacttcactatctgaaagcttttcttcttcttccggtgttagcgttgggattatctctatttcgaattcagtatcattttgcacaacgggctcaccctgcgaaattattattggaggcgtatctctatagacaaatgtctctagtaatagctcgtaaatacctaagggtaatagctctatctgagagggcgactcatcagaagaagaagagaaactataatttaagtaattgagttgagcatagtcaaatgctgttttaatatgatcaagcgtattttctgtgtttttctcagctattttttcttttatagactgaactaatcgattccctgtctctttattttctactgtaacacctatatttcctgtccggatgatggaatctaggattctgccaaaaaatgcggcattccaagtttcgggactatgaccgaataataaggtgaagtcagtcataatatccagcgtccattcaatacagtgaggtcttatttgacgtgtttgacgagaattaagtagagagtaaagagacactctacaggcttttgctacagcaggaagactcagtgcctgaccatgttgattggtgtcgatataagttaatgtcatataatgatcaaaaatttcttgtatttgtaacgctggtgttcttgacggctttttcttcagtggactactgcttccagcaatatgtaaagttttaccttgtgtattactgctaaaatatttatctgcacggaatacaataccatccaattgttgacatgtatcttgcattagatagttatagatatttaaaaaaggagtaaaggcgcatagtattttactggtttgtgccacatctcttttttccaaatacttatcgcctgtatctgcggtgagtatagattttgcgagaactaaaggattatctttattgtggttggttatgattatttctgtatctgtatctgtatctgtatctgtatctgtatctgtatctgtatctgtatctgtatctgtatctgtatctgtatctgtatctgtaaatgatgaagcatcattatcccaaccaaaagaaataatgggagaaatatctactagattactctccaacatttgcatgtattgaagttgtattgtgtctttttttatttgtataataaaagctaagttatcgatattgttgtagtgatcaaaataaaacttatttttcatttttcgatcagaaaacataacgcccctgttacttatgctaatattcgggccaccagaaattttgatgctatacttatcgcctccattcgtacctttactatcaaactctagtagaacctgtttgttttgtaagcgttcatcagtccagtattgaccaaatgctttagtgatgtttattttatagttatttataacaacacatcgttgatcacaattaataccttctttttctgatgctttaatgctagtgatgacattgctcatttccagcgcttgtaaatcgctgtcattgacgctctctgttaacccgaaaaaaggaggattgtaattatcattcttatatacagttgcgagcataccaggcggaatgctgatggattttattctatcattaggaataggtaattctttttgtccagattcaataatgatttctggatcgctatataaatctattttctgatgtgatgctaaacaagtactttcaccttgaaaatcatcctctgtataaaaacagattgcaggttctacctgatatgagcctattttattatataattctaatgctattaactcaggtagattaatatcatgtttcactcttgtttttgtaccagagaaattaatgccactataaagggtgagcaccatacctggtgggatagaaattgatgctatctcattatcaaagccatcattataaatagagcctgattccctttctgcggagcaaaatgattccccttcaaatttgtcgagttcataaaaacagacttttgtttcgtctgaataggatggttgcgatattattaatatgatgcttgctaatagtcttgtaactatacgcataggctctccctttgatgttattgatttttatgtttcatatcatcgacagggtttcaatactatatgatgcgtattttctttgctttatctatttttatttctctattttattatttagcagtgctaatttgagatttatgtaatttagatttaaatataaaaaagtaaaaataaaaaaactccgaatataaacattcagagtttttgggatatgaattttcaagcaaactgtaattaaactatcggttgcttaggcaaagtctagcgtggttcgccaatcggtaacactgtgcgaccatattgttcgttcaatacttcagccattgccagataaatcgcgctggcaccgcagatgatgccttcaaaaccagcgaacaccagcagcgagtgattaccggtaaagttaccgatagccaacagggcaaacagcagtgtcaggctggcaaacacgaattgaagcgcgcggttggctggcaaggtgccgaagaacataaacagggtaaagatgccccagatcccgaggtaaacgccaaggaactgtgcgtcagtggcttctgccatacccattttaggaagcatcagcaagccgaccagactcagccagaatgcgccgtaagaagtaaatgcagtcgcggcaaaggtattcccttttttatattccagcagaccagccagaatttgtgccaaaccgccgtaaaaaatccccatgctcaggataacggaagtcagggggaagaagcccgcgttgtgcaggttgagcaagacggtggtcatcccaaagcccatcaggcctagcgggccaggattcgccaacttgttggtgttcataagtcctctgcaataacagattgctaaaaaaatggataaatatccgaataagtataaatcgcctgaatgagtaaaaagtcgtctattccctcagtgcgcgcggcatcataatgatctgttcgaccggaaacaatgatcttgagtgcgataaaaagtaattttttttcatctccccccttgatgatggttttcatggccccatcttattcccaaccgcagtgactaatcgtggttagcggaaaattgtcagtaaatatttggcagttgaaaattagaaatccgcccatatatagattagtaacttgaccgattatgacttttttcgtggaggcgttttagatgggtaaaattattggtatcgacttgggtactaccaactcttgtgtagcaattatggatggtacaaaagcacgcgtgctggaaaacagcgaaggcgaccgcacaacgccttctatcatcgcgtatacccaagatggtgaaactctggttggtcaacctgctaagcgtcaggctgttactaacccacagaacaccctgtttgcaatcaagcgtttgattggtcgtcgtttccaggacgaagaagcacagcgtgataaagacatcatgccgtacaaaatcgttgctgctgataacggcgatgcatggctggaagtgaaaggccagaaaattgcaccaccgcagatctctgctgaagtgctgaaaaaaatgaagaaaacggctgaagattatctgggcgagccagtaactgaagcggttattactgtacctgcatacttcaacgatgctcagcgccaggcaactaaagatgctggccgtatcgcgggtctggaagtgaaacgtatcatcaacgaaccaaccgcagcggcactggcctacggtctggataaagaagttggcaaccgtactatcgcggtttacgacttgggtggtggtactttcgatatctccatcatcgaaattgatgaagttgacggcgaaaaaaccttcgaagttctggcaaccaacggtgatacccacctgggtggtgaagactttgatagccgcctgatcaactacctggttgaagaattcaagaaagaccaaggtatggatctgcgtaccgatccgttggcgatgcaacgtctgaaagaagcagcagaaaaagcgaaaattgaactgtcttctgcacaacagactgatgttaacttgccatacatcaccgctgatggcagtggtccaaaacacatgaacatcaaagtgactcgtgcaaaactggagtcactggtagaagacttggttaaccgttctatggaaccgctgaaagtggctctgaaagacgcaggtctgtctgtatctgacattcaggacgttatcctggtcggtggtcagactcgtatgccaatggttcagaagaaagttgctgacttcttcggtaaagaaccacgtaaagacgtgaacccggatgaagccgttgctatcggtgcagcagttcagggcggcgttctgtctggtgaagtaaaagatgtgttgctgttggacgttactccattgtctctgggtatcgaaacaatgggtggtgtgatgactccgcttatcactaaaaacaccaccatccctactaagcacagccaggtgttctctactgcagaagacaatcagtctgcggtaaccatccatgtgctgcagggtgagcgtaaacgtgcgcaggacaacaagtctctggggcagtttaacctggatggcattcaggccgcgcctcgcggtatggcacaaatcgaagttaccttcgatatcgatgccgacggtatcttgcatgtgtctgcgaaagacaaaaataccggtcgcgagcagaagatcaccattaaggcatcttcaggtctgaacgaggaagaaatccaaaaaatggtacgcgatgcggaagctaacgctgaagcagaccgtaagtttgaagagctggttcagactcgcaaccaggctgaccacctgattcatggcactcgtaaacagttggaagaagctggcgacaaactgccagcagaagacaaaactgccattgaagatgcactgaaagcgctggaagcagcggttaaaggcgaagacaaagcggaaatcgaagcgaaaactcaggcactggtccaggtttctggcaagttgctggaaatggcacagcagcaggcggcagccggcgaagcgggcgatgccagcgcgaagaaagaagacgacgttgttgacgccgaattcgaagaagtaaaagacaaaaaataatagcccttaagcgggcacagcagtggtaagagatactgttgctggaaaccagcacgggcgtcgaggaaactctacgcccgtgcacgcatgttaagggtaggaaaaacagaatggcgaagagagactattacgagattttaggcgtccccaagacggcggatgagcgtgaaatcaaaaaggcctataagcgcctggcgatgaaattccatccggatcgtaatcaggaacaggacgccgaaggtaaattcaaagaagttaaagaagcctacgaaatcctgaccgatgcgcaaaagcgcgctgcttacgatcaatatggccatgcggcttttgaacagggcggtatgggcggcggcggcggatttggcggcggcgctgattttagcgatatctttggcgatgtatttggtgacatttttggcggcggtcgtcgtcagcagcgcgccagtcgtggttccgacctgcgttacaatatggatttgacgttagaagaagcggttcgtggtgtaaccaaagaaatccgcattccaacgttagacgagtgtgatgtttgccacggcagcggagcaaaaccaggcagttctccgatcacttgtccgacttgccatggtgcaggtcaggtacagatgcgtcaaggcttcttcaccgtgcaacaggcgtgtcctcattgccacggccggggccaaattatcaaagatccgtgcaacaaatgtcatggtcatggccgcgttgaaaaatccaaaaccctttcggttaagatcccggcgggtgtggataccggcgaccgtatccgtttagcgggcgaaggtgaagctggtgaacacggcgcaccatcaggcgatttgtacgttcaggttcaggtgaaagctcacccgatcttcgagcgtgaaggcaataatctgtattgcgaagtgccaattaactttgcaatggcagcgctgggcggtgaaattgaagtaccgacgctggatggccgggttaaactgaaggttcctgcggaaacgcaaaccggtaaattattccgtatgcgcggtaaaggcgttaaatcagttcgcgggggcagccagggtgacttgctgtgccgtgtagtcgttgaaacgccggtaagtttgagcgagaaacagaaacagttactgcgtgaactagaagaaagtttcggtggtgcagcgggcgagaaaaacagcccacgctctaaaagcttcctcgacggtgtgaaaaaattctttgatgatttgacccgttaatcatagaacctatgattaggtagtggaaactaaatccctggtatataccggggatttttttcgccaatacttgcagctgcaacgtgatgttaatcattaattgctcggtttatacgagtggttaatgcaataaaaacgactattttcgagttaataattagcctagaatttgtaaattatttgccaatctctttggttggtttctctgtccgatgtagggagtattcattgtgacaaatattattcgccaattcttacgactagaagcggccgggggcatgattttgatcgtggccgcggtggttgctttactgatggctaacagcccactacagggtatttatcaaacgttcttagacattccggtcgcggtaaaaattgcgtcattggatatcagtaaaccgctattgctgtggattaatgatggtttaatggccatcttctttttggtcgttgggctggaagttaagcgcgaactgatggaaggttctttggctggccgtgataaagcggtatttccggctatcgcggcattaggcgggatgttggctccggcgttgatttatctgttatttaacggtgcagatgaagttacccgtcaggggtgggctattccagcggcaacggatattgcctttgcgctcggtgtgatggcgctattgggtaaccgcgttccaaccagtttgaaagtgtttttactggcgctggcgattattgacgatctgggcgtcattattatcatcgcatttttttatactcaggatgtttctctggccgcattgggcgcggcagccgcagcgattgcgctcttggcttatatgaactggcgcggagtcgggaaaacctcggtttatctacttgtcggcctgattctgtgggtgagtattctgaaatccggagttcatgcgacgctggccggtgtgattgtcggctttatgattccgttgcataccaaagataagtcttcaccttccgaatctttagagcacgggctgcatccgtgggtggcttatctgattttaccgctgtttgctttcgctaacgcgggcgtatctcttgaaggcgtttcgcttgcgggactgacgtcgttgctacctttggggattgccagcgggctgtttattggtaagccgttggggattttcctcttcagttgggtcgcggtgaaggttggcatcgccaaactgccggaatccattaattttaaacagatttttgcagtgtcagtgctgtgcggtatcggttttactatgtctatcttcattgcttcactggcgttcgaaggtggaagcgaagctttgagcacttactctcgcttaggtatattgctgggttctacagccgcagcgattgtgggatacacactgctacgcttggttttaccgaacaaaacgccggccgttaccgcaaaataattgtcgtaaatcattagaaggaataggccgaactgccgatgtagtgctcttttacaacgtcggcagttttgcttgatgggttcccgagatcgcattatgttttgatctcagaacaaaggaagttgatcgctcgggaaattgatcaccctatcgggcgatacgttaaggagatcactgcatgcgaatgtcacatatcaattttaaccacctctactatttttggcaggtgtgtaaggaaggctcggtagttggagcggcggaagcattgtttctcacgccacagaccattactggtcagattaaagccttggaagaacgcttgggcgggaaactatttaaacgccaagggcgcgggctggtaccttcagagttaggccagttggtttttcgttacgccgataaaatgttcatgcttagccatgaaatgctggatatcgttaattaccgtaaagaatctaacctgctgtttgacgtcggcgtggccgatgcgttatccaaacgattggttagccgagtattagaaaccgccgtggtggataacgagcagatacatttacgctgcttcgaatctacccacgaaatgttgttagagcagttaagtcagcacaagctggatatgatcttgtctgactgtccggtagattccagccaacaagaagggctgttttccgttaagctgggcgagtgcagcgtgagtttttattgccgtcagccaataccggaagcgccttttcctgcgtgtttgcaggagcgtcgtttgttaatcccaggtcgccgttctatgcttgggcgcaagttactgaactggataaacagcaaaggaattcaggttgagattctgggcgagtttgatgatgccgcattgatgaaggcgtttggggtctatcacaatgcaatttttgtcgcgccatctatgtatgccgatgatatcttttcaaatgaacaggttgtggaaatcgggcgtttagataatgtgcatgaagaatattacgttatctttgcagaacgaatgattcagcatcctgcggtacagcgtgtgtgtaataaagatttcacgtcattatttaacagttgaaagctcagtggttaaagtttaatcgctgggcatttaatagccgaaagtttgactgttgatgatttaaccgctgaaagtcggtttgatagataagaacgtagtcagcaaagaggatgctctatcagattatcgggtaggataaactggtagggcgacctaagatttgaatctgtgaccaaattgcagatataaaaaaaccggcctaggccggtctttttacaagcagtcaacttaatgcattactgcattgcgttgatttgcgctgtcaggtttgacttatgacgcgctgctttgtttttgtggatcagacctttacaggactgacgatccacaattggttgcatttcattaaatgctttttgcgccgcgtctttatcgccagctgcaattgccgcatataccttcttaatgaaggtacgcaccattgagcgacggctagcgttatgcttgcggcgtttctcagactgtacggcgcgtttcttagctgatttgatattagccaaggtccaactcccaaatatattctattgaggacaattcaaaggccgaggaatatgccctttttgccttcgtttgtcaatggatttgtgcaaataagcgccgtttgtacgggcggcacttgctacgttgtgatggagcgggattttaccagcttcgagcggtggaatacagtctttcgaaagaaaattccaccggcctcacctattaagccttcggcgatggtttttgcaaaagtcttaacggggggtctgtatccaactgctcgcgcattctacaggataaactggcgtaaaagtgttttaactgcgtattatcggtaaattgctatgactattggagtaaaggtgccaatcgcgggttaaccttaaccgctgtacaaggtataatccggcgatttccactgttttgagccagctatggagctaattcgcggtatacataatatccgggcacgccaccatggttgcgtgctaactatcggtaatttcgacggtgtccatcgtgggcatctggcattactggagcaactcaagcgcgaaggtcagcgcttagggctaccggtaatggtgatgatatttgagccgcagcctttggaactattcgcagcggaaaaagcaccggcccggttaacgcgtttacgtgataaagccaaatatttggcacaggccggcgttgactacttattgtgcgttaaatttgaaccgcgttttgctgccaatatggcccagacctttgtggctcagttactggtagaaaagctcggcgttaagtttctggcggttggggatgattttcgctttggcgctgggcgtcagggggatttccgactgttgcagcaggctggtgccgagtacggtttcgatgttatcagcaccgacagtttctgtgacggtggcttacgcattagcagcacggcgattcgtcaggcgctgcatgatgacgatttgtcactggcagaaacgttgcttgggcacccttacagcatttctggacgggttgttcatggtgatgagctggggcgaaccattggttttcctacggcgaatttaccgttaaaacgtttagtcgctccggtcaaaggagtgtacgcggttgaagtgtatggcttggatccagagccgttacccggcgttgccaatatcggcacgcggccgaccgttgccggcattcgccagcagctggaggttcatctgcttgatgtaactatggatctttatgggcgccacattgatgtggtgctgcgcgcaaaattgcgtgatgaacagcggtttgcttccctcgatgctttgaagcagcaaatcgccaatgatgtggtgacggcccgaaatttcttcgggctaaagacaccggtttaatatttctagccgaaaacggaaccgagaatctaatgagtgactacaagaataccctgaacttgccggaaacagggttcccgatgcgcggcgatctggcaaaacgcgaacctgagatgctgaaacgttggtatgagcaggatttgtacgggaaaattcgtgcggccaagaaaggtaaaaagtcctttattttgcacgatggccctccgtacgcgaacggcaatattcatattggtcactcggttaataaaattctcaaagacattattattaaatcgaaaggtatggccggctttgactcgccttatattccaggctgggactgccacggtctgcctatcgaattgaaagttgagcaactgattggtaaaccgggtgaaaaagtcaccgcggccgagttccgtgcggcctgtcgtaagtacgcgacagagcaggtagaaggccagaaaaaggactttatccgtctgggcgtgttgggtgactgggatcatccttacctgacgatggacttcaaaactgaagccaacatcattcgcgcactgggtaaaatcatcgataacggccatctgcacaaaggtgctaagccggtgcactggtgtaccgactgtggttcatctttggccgaagcggaagtggaatattacgataagacttctccgtctatcgacgtgcgctttaacgccgctgatgcagccaccgttgccgcgaaatttggcgtttctgacgttaccggcccgatttctctggtgatctggacaaccacgccgtggactctgccagctaaccgcgcgatttcactgaatccagaatttgtgtatcagctggtgaaagtgggcgacgagaatttgattctggctgccgatctggtggaaagcgtgatgaaacgcgccggaatcatcgagtggactgtgttgggcaactgccagggcgcggatctcgagctgctgcgtttccgtcatccgttcctggatttcgacgtgccggcaattttgggcgatcacgtgactctggatgccggtaccggtgcggttcataccgctcctggccacggcccagacgactttgtaatcggtcagaaatacggtttggaagtggcgaatccggtagggccaaacggctgctacctcaccggcacttacccaatgctggacggcgtatttgttttcaaagctaacgatatgatcgttgagctactgcgtgagaaaggcgctttgctgcacgtagagaaaatgtctcacagctacccgtgctgctggcgtcacaaaacgccgattatcttccgcgcgacgccacaatggttcatcagcatggatcagaaaggtctgcgtaagcagtcgttggaagaaatcaaagacgtgcagtggattccagattggggtcaagcgcgtattgagaccatggttgccaaccgtcctgactggtgtatttcccgtcagcgcacctggggcgtgccgatgtctctgtttgtacacaaagaaactgaagccctacatccgcgcagcactgagctgatggaagaagtggcgaagcgtgtagagcaggatggcattcaggcgtggtgggatctggatcccgcggaaattctgggtgcggacgccgacgattacatgaaagtaccagacacgctggacgtttggtttgactcaggttcaacccattcttcagtggttgacgtgcgtcctgaatttaacggctatgctccggatatgtatctggaaggttctgaccagcatcgcggctggtttatgtcatcactgatgattgcaactgcaatcaaaggcaaagcgccttaccgccaggtgctgactcacggtttcaccgttgatggccagggccgcaaaatgtccaaatccatcggtaataccgtcagcccacaggatgtgatgaacaaattgggtggcgacatcctgcgtctgtgggtggcttcgacggattacaccggcgaaatcgccgtgtcagatgaaattctgaagcgctctgccgattcttatcgtcgtatccgtaacaccgcgcgcttcctactggctaacctgaacggtttcgatccggttcagcacatggttcagccggaagatatggtggtactggatcgctgggcggtaggtcgcgcgcaggcggcgcaggctggcatcatcgaagcttacgaaaattatgatttccatctggttgtccagcgtctgatgcagttctgttcggtcgaaatgggctcgttctatctggatatcattaaagaccgtcagtacacggcgaaaggcgacagcgttgcccgccgtagctgccaaagcgcgttgttccatatcgccgaagcgctggtgcgctggatggcgccgatcatgtcctttactgccgacgagatctggaaccaactgccgggcgagcgtccagagtatgtcttcactgaagaatggtatcaggggctgtttggcctgaccggcactgaaagcatgaacgacagcttctgggacgaactgctgaaagtccgtggcgaagtgaataaggttctggaacaggctcgtagcgataagcgcatcggtggctctctggaagcggatgtgactctgtttgccgaacctgaactggcggcgcgtctgaacagcctgcaagatgagctgcgttttgtattgctgacttccggcgctcacgtagcggattacgctgcagcaggggatgatgcacagcaaagtgaactcatcagcggcctgaaaatcaccttcaagaaagccgatggcgagaaatgcccgcgttgctggcactacacgcaggatatcggtctggtagcggaacacgcagatttatgtggtcgctgtgttactaacgtggccggtgacggcgaagagcgtaagtttgcctaatgagtaagccgatttgttcgaccggattgcgctggctgtggctggcggtattggtggtggcattggatttggggagcaagcagtgggtgatgactcaccttgcgttgggagagtcgatccctctgatccctttctttaatatgacctatgcacaaaatccgggggcggcgtttagcttcctggcggataaagatggctggcagcgctggttctttgcgctgatcgccgtcggtatatcggtgacgctggcggtactgatgtaccgctccagcggcaaacaacgtctgataaactgtgcttatgcgctgattatcggcggtgccttaggcaatttatttgatcgtatggtacatggcgtcgttatcgattttattcatttctacgttaatgactggcattttccgatcttcaatctggccgacacggctatttgtatcggtgcagcgctagtggtatttgaagggtttttaagcccttcagaaaaagccgcaccaaagaaaggtgagtaatatgtcagaccgggtacaggataacagtgccgttttggtgcattttacgctgaaactggaagatggctctacggctgaatccacgcgcacacacggtaagcctgcgctatttcgcttaggcgatggcagcttatccgatcagttggaagaagagctgcttggcctacagattggtgacaagcatgcctttactttgccaccggaagcggcgttcggtctggaaaacccggatctgattcaatactttagtcgacgtgattttgctcaaaccggcttgccggatgcgggcactatcatgctgtttaccacccgagacggcagtgaaatgccgggcgtggtgcgtgaagtggctgaagaatccgtcaccgttgatttcaatcatccgttggccggtcaatctatcagctttgatatagaagtgctggagattgatcctcaacaggaggaatctcatgcaaatactgctggctaatccacgaggcttttgcgccggagtcgatagagctatcagcattgtagaacgcgcgttggagatgtacggcgcgccgatctatgttcgtcatgaagtggtgcataatcgctacgtggtggatagcctgcgccagcgcggagccatctttatcgaggaaatatcggaagtgccagatggctctattctgatattttctgcccatggcgtttcccaggccgttcgggcagaagcccgctcgcgccagttgacgatgctgtttgatgcgacctgtccgttagtgaccaaggttcatatggaagtggctcgtgccagccgtaagggcaaagaggcgattctgattggacatgcgggccacccggaagtggaaggcaccatgggacaatacagtaacccggaagggggaatgtatctggtggaatcgccagcggacgtgtggacgctggaagtaaaaaacgaagataatctgtgctttatgacgcaaaccactttgtcggttgatgatacgtctgaagtgatagatgcgctgcataaacgcttccctaagattatcggtccgcgtaaagatgatatttgctacgctaccactaaccgacaggaagcggtgcgcaatctggcggataaagcggacgtggttttggtcgtcggctcgaaaaactcgtctaactcgaaccgtttagccgaattggcacaacggatgggcaaagcggcttatctcattggctctgctgatgatatacaagaaatttggctgaacaatgtttcctgcatcggtgtgactgctggagcctcagcgccggatattctggtacggcaagtcattgctcgcctgcaagatctgggggcgggtcactcaattgaactgagtggcagggaagagaatattgttttcgaagtgccaaaagagcttagggttaacgtaaagcaggtcgactaagttagccgaatataaaaaagcagccttggggctgctttttttatggcaaaagaaaacccaaggtaacggtttggatacagtaatgttaaatgagtttcttctggctactccttgaaaatgcatgaatatgcgtaaagatgcagcgctgaaaatttgcccgttttcggtttgttatgcagaaattgagagaattccatctgattatccgatgcgccggcgctttttacctgcaatagatgagtaattaagtgctttcactgataaaaatgagcggatatcatttttttctaatacagcttaaatagtctggcagactcagtggcagaccgctaatctgaaccctgatcagggctgatataaaacaacaagaggatttatgactgattcagcaattcgtgtcgctattgtcggtgccggtggccgtatggggcgacaattgattcaggccgtgcatcaaattcctggagtaactctgggtgctgcgctggagcgcaaaggttcgtcactggtaggcactgatgccggcgaactggccggtatagggttgctaaatatcaaggtggcagatgatgttgccgaagcaataaacagctttgatatccttgtggactttactcgtccagaaggctcgttggcgcatttggctctgtgccgccagcacggaaaaggtatggttattggtacgactggctttgatgaagctggcaaagctgcgattagcgccgcggcggcagatattgcgattgtttttgcggccaattttagcgtaggcgtcaatctggtccttaagctgttagagaaggccgctaaagtcatgggtgactacgccgatatcgaaattattgaagctcaccaccgccataaagtcgatgcgccttcgggcactgcgttggcgatgggagaagcgattgcggaaacgttagggcgcgatttaaaagactgcgccgtttatagtcgcgaaggttataccggcgagcgtaaggaagggactatcggttttgctaccgtccgtgcgggggatattgtgggtgagcatactgcgatgtttgcagatattggcgaacgggttgagatcacccataaagcgaccagtcgtatgacttttgctaatggagcaattaaatccgcaatctggctatcaactcaggataaaggattgtttgatatgcgagatgtcttgggtttaaacgatttataatatgtaatgtaccgctgtgatgtggttattcctatcataactatctgatagtagagcgatatttttatcgctcttttttattttgttattttaagtgttaagtggttattttattattagatggctgtttttgtgttttttaatgtgtttttcagcgttttattgaaattttacgactcctatcattgccaatttgccttttctctctccgaatacgttaaaattcactctatcaccctcgcaaccgtttactatgttaacttagtttgtatttttgccgccataaacccactattttggcgagatgggcaaaaaacaaagaaaaaatggtactttggctagacaagagcctagctcatcattaaaatgcgcccaatttgccaaaaattagctttgagggcggtttttgcattgatttagatcgttaattctgaattaatatgcagataatgtgactgtttattccttggagggtgttttgattaagtcagcgctattggttctcgaagacggaacccaatttcacggtcgggccatcggggcagaaggttcggcagtgggggaagtggtcttcaatacgtcgatgaccggttatcaagaaatcctcactgatccttcctattcccgccagatcgttactcttacttatccccatatcggcaatgtcggcaccaacgccgccgatgaagaatcctccgcagtacacgcccaaggtcttgttatccgcgacctgccactgattgccagcaactaccgtaatgaagaaggcttatccgaatatctcaaacgccgcaacatcgttgcgattgcagatatcgatacccgtaagctgactcgtttactgcgtgagaaaggcgctcagaacggttgcatcatcgctggcgacctgacggatgcggctgtggcactggaaaaagctaaagctttccccggtctgaaagggatggatttagcaaaagaggtcacgaccaaagaagcttacacctggctgcaggggagctggacgctggaaggcgaactaccggcggcgaaaaaagctgaagaattacctttccatgtagtggcttacgattatggcgtaaagcgtaatattctgcgtatgctggtggatcgtggctgccgtctgacggttgttccagcgcagactccggcggaagacgtgctgaagctgaatccagacgggatcttcctgtccaacggcccgggcgatccggaaccctgcgactacgccattaccgcgattaaacgttttctcgaaaccgatattccagtctttggaatctgtttaggtcaccaactgctggcactggccagcggcgcaaaaacggtaaaaatgaagtttggccaccacggcggcaaccatccggtgaaagatttggatggcaactgcgtgatgattaccgcacaaaaccacggcttcgcggtggatgaaacctcattacctgccactttacgtacaacccacacttcgttattcgatggttctctgcaaggtatccatcgtactgataaagcagcgttcagcttccaggggcaccctgaagcgagcccggggccacatgatgccgctccgctgtttgaccactttatcgaactgattgaagcctaccgcgcatcatcatcagcaagcactaatagcaagtaatcaggagctaagaccatgccaaaacgtacagatataaaaagcatcctgattctcggcgctggcccgattgttatcggacaggcctgtgagttcgattattcaggtgctcaagcctgtaaagccctgcgtgaagaaggttatcgggttattttggtgaactccaacccggcaaccatcatgaccgatccggaaatggccgatgcgacctacatcgagccgattcactgggaagtggttcgcaaaatcattgaaaaagaacgtccagacgcagtattaccaaccatgggcggccaaaccgcgctgaactgtgcgttggaactggaacgtcagggcgtgctggccgagtttggcgtgaccatgattggtgccaccgccgacgccattgataaagcagaagaccgccgtcgctttgatatcgcgatgaagaaaatcggtctggatacggcgcgctccggcatcgctcacaatatggaagaagcgctggccgttgcggctgacgtgggtttcccttgcatcattcgtccgtccttcaccatgggaggcaccggcggcggtattgcctacaaccgtgaagagttcgaagaaatctgcgagcgcggtctggatttgtctccaactaaagaactgttgattgacgaatctctgatcggctggaaagagtacgagatggaagtggtgcgtgataaaaacgacaactgcatcatcgtctgttccatcgaaaacttcgacgctatggggatccacaccggtgactccatcaccgttgcgccagcgcagactctgacggataaagaatatcaaatcatgcgtaacgcctcgatggcggtactgcgtgaaatcggcgtggaaaccggcggctccaacgttcagttctcggttaacccaaaaactggccgtctgattgttattgagatgaacccgcgcgtatcccgctcttcggcgctggcatccaaagcaactggtttcccgattgccaagattgccgccaagctggcggtaggttacacgctggatgaactgaccaacgatatcaccggtggccgtactccggcgtcatttgagccctccatcgattacgttgtgaccaaaatccctcgctttaatttcgagaaatttgccggtgccaacgaccgcctgacgacccaaatgaaatcggtcggcgaagtgatggcgattggccgtactcagcaagaatccttgcagaaagccttacgtggtctggaagttggcgcgaccggctttgatccaaaagtcagcctggacgatccggaagcgctgaccaagattcgccgcgagctgaaagacgctggcgcagagcgtatctggtacatcgccgatgcgttccgcgccggtatgtccgtagacggcgttttcaacctgaccaacgttgaccgctggttcctggtgcagattgaagaactggttcgtctggaagagaaagtagctgaatgcggtatcaacggcttgaattatgaattcctgcgccagttgaagcgtaaaggttttgctgatgcgcgtctggctaaactggttggcgtagccgaaagcgaagtgcgcaagctacgctacaaatttgacctgcatccggtttacaaacgtgtggatacctgtgcggcagaattctctactgatacagcctatatgtactcaacctatgaggaagagtgcgaatctaacccaaccagcgatcgtccgaaaatcatggtgttgggcggtggtcctaaccgtatcggtcaggggattgaattcgattattgttgcgttcacgcctcgctggcgctgcgtgaagacggttacgaaaccatcatggtgaactgtaaccctgaaacggtttccacggattacgatacctctgaccgtctgtacttcgagtcagtgacgctggaagacgtgctggaaatcgtacgtattgagaagccacagggtgttatcgtacagtacggcggccagactccgctgaaactggctcgcgaactggaagctgccggcgttcctgttatcggtaccagccctgatgccattgaccgcgcagaagaccgtgagcgttttcagcaggcggtgaatcgtctgggtctcaagcaaccggctaacgccaccgttgccactatcgaacaagcggtagataaggctagcggcttgggttatccgttggtggtgcgtccttcctatgtactgggtggccgcgcaatggaaatcgtctatgacgaaaccgacctgcgccgttacttccagaatgcggtgagcgtgtctaacgatgcaccagtattgctggatcgtttcctcgatgacgcggtggaagtggatgtggacgcgatttgcgacggtgagcatgtgctgatcggcggaattatggagcatatcgagcaggcaggggttcactccggtgactcagcttgttcattgccagcctacacgctaagcaaagaaattcaggatgttatgcgtcagcaggttgagaagctggcgtttgaactgtgcgttcgcggtttgatgaacgtccagttcgcggtgaagaacaacgaagtttatctgattgaagtgaacccacgcgctgctcgtaccgtacctttcgtttctaaagccaccggtatgccattagcgaagattgccgctcgagttatggctggcaaatcactggcagagcaagggataaccgaagaaatcatcccgccatattactcggtaaaagaagtggtactgccgtttaataagttccctggcgttgacccgattcttgggccagaaatgcgttcaaccggtgaagttatgggcgttggccgtaccttcgcagaagcattttcgaaggcgatgctgggcagccagtccggtatgaagaaaagtggtcgtgcgctgttgtcggtgcgcgaaggggataaagctcgcgtggttgatttggctgccaagctgctgaaacaaggcttcgaactggatgcaacccatggtactgcggtggtgttaggggaagcgggcataaatccacgtttggtcaacaaggtacatgaaggccgtcctcacattcaggatcgtattaagaatggcgagtacacctacattgtcaataccacggcgggacgtcaggctatcgaagactccaagctgattcgtcgcagtgccttacagtataaagtgcactatgacaccacgttaaacggtggtttcgcgacggcaatggcgctgaatgcggatccaaccgagcaagtgatttcagtgcaggaaatgcatgccaagattaagcaaatgaaaggttaatctgggtaagcgcaaaattgaaaggcgatggaaacatcgccttttttgtgactgaaacaaagtgaatcaactcagggcgactttaatacccagaccaatcagtaaaccgccgagaaccttatccaccagtttttgtgctttcgccagcccgcgccgaaccggagcgctttggatcaaaatgaccagtattggccaccaaactactgctaatcccaatatgatcgaggcgtaccacagtttttcgccgataccggagttaatctgaagtatctgggtgaataccgcgagaaagaatagcgttgctttgggatttagcaggttgcaaaggtagccctgcagaaaggcattcttcatcttgatagtttgttgtggcaaatggctgatattcattttgctttctccgcgtgagagaagcgcctgaatacctacccaaattaggtagacagcaccggcatatttcaggaaattaaataaccacggggtagtggtaataaccaccgccaggcctgctacgcagtaagacatgtgagtcgccacgccgcaaataacgccaaatgcggtcatcatggcggcagaacgacgatagcgagcggcattttttatgaccagaaagaaatcagggccgggagaaagcatccccaaagtagcgatagtggcaacaaataatgaagtttcgagcatcagggaattccgcaatgtagcagggtaataggtgaataatagcgctgtcccagttccctgacatcaccttaatgggtaagaaattaaaatcaacgtttcactcttttgacaggtatcgatacagaatgatgagccaggagaatgcaatttgtcagggtataccccatcagcagcagcgggagattacccggctatgtatacaatgtgccctgttattgttacagcatggcgcagaaagcatgttggtagaacaactctccgctcgtctggggattgccttgggaatggatagcgttgaaagctcgatctctgctaacgcggtggtattaacgactattagccaagggaactgcctgacctcgacccgaaaaaataccgatcgcggcattaatatgcaggttgtgaccgaagtacagcatattgttattttagctgaacaccgtttgctggatgctcaggatgttgcaaaacgcttagatcatattcggccactacgttatccacgttggctggtggtagcgatggtcgctttgtcctgcgggtgctttagtatgctaaacggcggcggttgggatgccttttctatcacttttatcgccagcggcgtgtcgatgtttgtgcggcaaagtttgacagctcgtcatatgaatcctctgattaacttctgtattacggcattcgttgcgacttcggcatcaggtttgctgatgcgcttacctcagtttgaacaggcttccagcgtagcaatggccgccagcgttttactgttggttcccggattcccgctgattaatgcggtcgcggatatgtttaaaggccatgtgaataccggactggctcgttgggcaatggccagcctgttgacgttatcgacctgtattggcgtggtgatcgccatggcactgtgggggctgcggggatgggcatgagtttattatgggctttgctgcaagatatggcgctggcggccattccggcattgggttttgcgatggtgtttaacgttccgattcgggcattacgttattgcgcactgttgggcgctatcggtcacggttcgcgtatgctgatgatgcattttggtatgaatatcgaattggcgtcgctggtggcttcaatcctgataggcgtgattggtattagctggtcgcgctggctactcgcgcacccgaaggtatttacggtcgctgcggttatcccgatgtttcccggtatttctgcctatactgcgatgatctcggtggtagaaatatcccatttgggatacaccgaggagttgatgtcaacgatggttaccaatttcttaaaagcttcatttattgttggcgcactatcgataggtttatccttgccaggattatggctttatcgtaagcgcccgagtgtataggctttttttccgaggtcagcagtcccatcgctaagagctgtcttatatgtgctgttagcctgattatgactatcgacggctgataaggctttacgtatagtgtgagcaatttttcgggactggctaacttagcctacagggtttaataatgattatcagcctgatcgctgcacttgcggcagatcgtgttattggtatggaaaatgccatgccgtggcacctaccggctgatttggcgtggtttaaacgtaacacgctgaacaaaccggtaattatgggtcgcaaaacgtttgaatctattggtcgtccacttcctggccgtctgaatatcgttatcagcagccagtcgggcaccgacagccgcgtcagctgggcaacttcaatcgacgaagcgctggctttagccggtgacgttgaagaagtgatggttatgggcggagggcgggtatatagccagttcctcgatcgcgcacatcgcttgtacctgacacacatcgatgctgaagttgggggcgatacacatttccctgactatgaacctgatgaatgggaatcttcattcagtgagttccacgatgcagatgaagctaattcacatagctattgctttgagatattagagcgtcgctagtttttaccgaactggattaattcaataggaggcctatatggcctcctttttttatcaaaaaatgcctgtctattattatggttctcgttattaaattagaaaatgccagagttcaatctggttgatatatttatttttcctttcaatgctaattcttactttatataaatgggagtgttaaatgcgaaaaataaatatggtaacgattctacctattattctatatagccacctgttatcagcctctgtcaatcattgcccagagccgagtgaaattgatggggctaatggtatggggttatattttacggcaaatagtcagtggcttggagtatctcaaggcgctgagaataatggaaaagtttctcattttttacgggctacctaccatccttataatagtaacgctgagactataggtattttaactagctgtagctatgcccttgaatctggaactatagatatgcatatgaaagattatgagtcgataaaaaacggtggcttttttgtttctctgaaagggcatgagccttgggtgaagacgtcatcgacgttaacgggagataaattcgtttgtcagtctgatgatgtgaaatattgtacttttgaccggttggattattaccaaatatgccagtttcagacggaaaataatagctagagtaatgtaatgaatactaagaaaggctaactgttaatcactattattttgatctatcttttttgagagtctccgagtgtcatttatttgtcataagtgagacttattatttctatgcatctgcttttatcaattaaaaataagggaaaatacttatggtaaatgaagttatgcaattgaatgaagatcgattgatcaatcgtgcaggacgagaactgcgtgcagataatattgataaaataggtttagttggaattcttggcggcggaatctggcctgcctcaatcgagagcgacagcttcgacaacatgcttcaaagcagtgcggttacggataggaatttttggcaagagtagttcggtgcgcaatgtcattctgaaaaatgagaaatggcacaaataaatacgtgccatttcatcatattaaacgaggttaattagccgctgcgatgctgacgtcagtgcctttttcgcggaaagattgctgagtgaaatagcgcttatcttcccagcgcagcatagtcagcacgcctccccagcaacagccggtatccagcgcgtaaataccttccggagcgcctttcccttccagagatgcccagtgaccaaacgcaatggaataatcaggatcaaccaaccgaggcaaatcaaaccagggttttagcggtgatggcgcattctctggcgtatctttgcagatcatgtccaactgaccatttgggaagcagtaccgcatacgggttagagcattagtgctaaaacgcaaacgagccagaccagatagctcctggctccaattgtttggcatatcgccgtacatggcatccagaaatagtggatagctgtcgctactcagcaccgcttcgacttcgcgggcacaggtttgggcggtttcaatatcccactgtggcgtgattcctgcgtgggccatcaccagtttcaattcctcatcgacctgaagcaccggctggcggcgtaaccagttaatcaattcatcggcgtcttgggcttccagcagcggggtgatgcgatctttgggcttattgcggctaatgccagcataaactgctaataagtgcaggtcgtgattgcctagcaccatacgtacggccgggcctaatgcgcgaacatagcgcagaacatctaaagatgcggggccacgggcgaccaaatcaccggttaaccaaagagtgtcttgctgagtattaaactcaacttgcgccaatagggcgcgtagttcatcgatacagccgtgaacatcgccaatcaggtaggtagacatatttttcggggccggattagtggatcagcgtcgggatagccaaacggaagacgggaattgccgtacggaatgcctggcctaggtgatcaaccatttcgtagtgcccttccatggtacccagcggcgtttctagtaccgcgccgctggtatattggaattcattgcccggaagaatcagcggttgctcaccgataacgccttcaccttgaacttcggtctgacgaccgttgctattggtgatcagccagtaacgaccaaccagctgaaccgttgaacgccccagattgcgaatagtgacggtataggcgaagacaaagcgttcttcatcaggtatcgattgggtttccacatagatactttgtacctgcacacacacacggggccgttcaatcatggcgaactcctgttattcctgcggtgtcgattgcgccgaaagccagttagccagcttacagtattgcgccacagaaatgttttctgcgcgaagcgtcggattgacacctaattcggttaattgctcaggcgtaaacaaatcccctaagctattacgtacggttttcctgcgctggttaaaagcttgcgtagtaatgcggctcagcatacgcacatccccaaccgggttaggcatgttcacatgaggaaccagacgtaccacggcagagtctacttttggcgctggggtgaaggccgtaggtggcacttcaagaactggtatcacgttacaataatattgcgccatgacggttaagcggccataagccttactgtttgggccagcaaccaagcggtttaccacttctttttgcaacatgaaatgcatgtcgcgaatagcctgagtatagctgaacaggtggaacattaacggggtagaaatgttgtacggcaggttaccaaacacgcgtaatggctgacccgcctgttctgccagctcggcaaaatcaatcttcatggcatcttgctggtggatcgtcagcttatcttttagctgcggatggctggccaaacgtgcggcaagatcgcgatccagctcgataaccgtcatgtgatccatacgtgcagcaactggttcggttaacgcgcctaagccgggcccgatttccactaccgcttccccgggaacagggtggatcgcagaaacaatactatcgatgacaaactgatcgtttaaaaagttttgtccaaagcgtttgcgggcaaagtgcccttggtggactctattattcattgctgttatttatcattttaatggctaaatttaatgccgttttgaagctgcccacgtcggcagtgccggtagcagcaagttccaaagcggttccgtggtccactgatgtgcggataaaaggcagaccgagggtaatatttaccgctcgtccaaagccttggtattttaacaccggtagcccctgatcgtgatacatggctaatacggcatcggcatgttgcaaatatttgggctggaacaaggtatccgccggcaacgggccaatcaaggtcacgccttgctgacgcagctcgtctagcgcgggaataatgatatccagctcttcacgacccatatggccgccttcgcctgcgtgtggatttaacccacaaacataaatatgcggctgttggatgccaaatttggttttgagatcccgatcgagaatagtgataacttcgtgcaggttatcccgagttatagcgcgagaaacctctgacaacggtaaatgcgttgtagccagagcgacgcgcagctcttcggttgccagcatcataacgactttttggcacaggctacgctcggcaaaaaactcagtatgaccagtgaaagggacgcctgcatcattaataatgcttttttgtaccggaccggtgaccaaagccgcgaattcaccccgcaagcatccatcgcaggcctgagccagcgtttctaccacgtaggcgctgttactaaccgaaggaacacctgcggtgaccggagcggcggcaacgggcaggatggttaaggttcctgcccgctgggcaaggccagcttcatcgggttgatattcccgcaattgcagagggagcttcaattgctccgcccgttcaagtagcaaggccggatcggcgcacacgactaactcaacaggccagtcctgttgagccagagtgatcaccagatccggcccaaccccggcaggttcgccgggggtaatgacaatgcggttatttttgtgcatcgctaccatcaagaatcttcacataagaagcggcacgttgttcctgcatccaggtttgcgcttcttcagagaatttacggttaaacagcatgcggtaggcacgatctttctgcgccgcatcggttcggtctacctgacgggtatcgactacctgaatcaaatgccagccgaaagatgaatgaaccggcgcactgatctcgccttttttcagtttcatcaaggcatcacggaaggctggatcgtagatgtcgggagaagcccaacccagatcgccgccttgtaccgcagagcctggatcttcagaaagtcgcttggcttcatcggcaaaggttgccttgccgcttttgatatcattcgccgctgcctgtaattttgcgcgtgcctgatcgtcggtcatcacaacggatggtttaagcaaaatatggcgagcgtgcacttctgtaaccgaaacggtttgatttgtgccgcgaatatcattcactttcagaatatggaaaccgacgccggagcgaatcggcccaacaacctgacctttgctggccgtttgcagtctttcagcaaatagcgttggcaattcctgtagcttgccccaacccatttggccgcctttcaatgcctgagaatcggcagagtttgcgatagccaatttgccaaagtccgcgccatttttgagttccgcgaccagattttttgccaagtcttcagcggtatcaacctgctgttgggatggattttccggtaacggaattaaaatgtggctcaggtttaattcagcgtcatcgccggtctgggctgcgatctgtttggccagtgattcgacttcttgcggtaaaatggtgatgcgacggcgaacttcgttatttcgcacttcggaggtcagcatttctttgcgaatctgggcgcggtaagtgttgtaatctaacccttcagcggccagacggctgcgcatttgtgccgttgtcatacggttttgcgccgcaatatcagcaatggctttatccagcgcttcgtcggaaacggtaatccccattttctgtgccatctgcaattggatattatccataatcaggcgttccagaatctggtggcgcaacgtgccttcgtcaggaatttgctgaccagcctgttgcgcattgagttttaccgactgtaacaaaccgtcgacgtcactctgcaagaccacaccgttattaaccacggcggccactttatcaacttcttgtggtgctgcgaacgcggtattggcaccgatcaccaatccgagaataagcgttctccagttcttcataccttttccattatgtaatccgcagttgcgggtttaaattcactgaattcagtgtgttactcagtatcagaatgcgctttggtaaggcaggataccagagcgtaacatctgttgggtacccaaactgtggttgctgcttaaaccacgtaactctatgttaaacgagattttgttatcatatttactggtattgtccagcgtgttccagccgttgattttacgctcatagcccagattaatcgcccaacagcaggtattgtactgtaccccaaccagttggctagccggttgattggccttagtgtcgtaatagtatgacccgacgatagcccaacggtcggccaacggtaaactggccactgcacccacttgagaaataccttcctgatagccctggcttctcaccttaggtaccgccgcctgaatatattcagggctggcgtagcggtagttcaactgaagcaccgtttcggcattgtggcgatattccatcactgtattaccctgagtcagacttcccaagcgggtatcgtactgcgctccgcctctaaagccccacttatcggtaattttccaataggtgtccccggcccataccaggctaccggtatcattgctgttgtcgatattggctgagtttttattattatcaccggttctggaaggggtgaaataatagatttgacccaaggaaacgttaaaacgttcaaccagcccatcatcataaatgcgagaagttaaaccggtagcgatctgattggccgatgcgatgcgatccaacccgccatatgtacggtcacggaacaggccggtatagtcagtttgcagcagagtggtgtcgtaaagatagatgtcatcctggttgcgataaggcacatacaaatattgggctcgtggctccaaagtttgcgtatagccttctgcccaatccatctggcggtcaaataccacttttccatcgactttaaactgtggcagaacgcgattgactgaatcttgcagttctggagccacaccaccgttattcgccacataattacttgaaaaaccagtgggaatatcttgctgatagtgagttgccatcagcttgatttcggtattcaggctcgcccaatcgttcgccagaggaagattgattgatggctcaatatggaaacgatccgccttcggattattcggattcacgctggtgaatttaactgcttgcccatacacccgcatatcgaacgggcctacatcgtttttgtaataattgagatctaactgcggctgggcgcggtaggcatttgagtcaccgccaccattggcgaatacttggaactgtttggatgacaatgtagcgtcccagtttttctgcgcatagcccacgctaaaaatttgcgtggcgtagccgtcagtactggaaccataaagtgaagtgaagtctctaaagtaagtcggatcgctgactttggtatagtcgatgttaaagcgccatacctgatccatgacgccagaatggccccagtagtagagccaacgagctttatcattattggctttgtctgcgctggcatattcgcggtcgcttgatagccagtcgaatgccatggtaccagcaccgggggctagcaaatagcggaattcgttctggaactgagtgccgcgtttctcaatgtagtgaggtgtaatggtggcatcaaagttcggcgcgatgttccagtagtacggcaacatgaattcgaagccgttattggtgctgtaacgcgcattcgggatcaggaaaccggagcggcgtttatcgccaacgggcagttgcatatatgggctatagaaaaccggtaccggcccgattttaaagcgtgcattccagatctcggccacttgttcttcgcgatcatgaatcacttcgctacccactacgctccagctgttatcaccgggcaggcacgaggtaaaagtaccgttttccagaatggtatagcgattttgaccgcgcagtttcatcagatcggcatcaccgcgaccctgacgccctaccatttggtagtcgcccttatccatattggtgtctttggtgttcagatttgaccaggcttttggccctttcagaataatctgcggatcgtcgtaattgacatcacctatagcggtgacggttcgcaccggaatcggctggccgggttcctgtgtctggtgtaactgaacctcattggccgttagggtgctgttaccctgctggacattaacgttaccggtgaaaaccgcactgtggggataattgccttcggttttatccgcttggatatgcaccggaagctggttggtatcgcccgtaaccagcggtttgtcataggtaggaacgccgaacatgcattgttcagcgaggtcggccagcgattgctgactatagagtgccgtccatatcaacgtggccagcagtgttgggaatctttttttcatacgcgcttttggtgttccgtcatcaggggcaacgtgccggcaaacggtctgagactatctcactcatcagagttgcgctagtgttaaatccggccgtttacacgtctcgccgttaggcacagagctaaatgccgagtatgataatgcaaaatttgactgacggcatgatgaattgaggagtatatgcagtattggggaaaactgctcggtctgatattgggattgatgtccggtattggtttctggggtgtagtactggggttgatcgtcggccatatggtagataaggctcgaaccgcgcgacgccgcggctttttcgtcgatcagcaaacgcgacaatcactgttttttcgcaccacatttcaggttatggggcacctgaccaaagccaaaggacgcgtaactgaagttgatattcagcttgccagtcagttgatggatcgtatgcaattacatggaaatgcccgcacggcggcgcagcaggcgttccgtgaaggtaagcaaagcgacttcccattgcgggaaaaactgcgtgaattgcgcagcgtttgcttcggtcgtttcgatcttattaggatgtttctggaaattcagttacaggctgcttttgccgatggttcgctccatccgaatgaacggcaggtactgtacgttattgccgatgagctaggtatttcccgcagccagttcgatcagtttcttcgcatgatagaaggtggtcgtcagtttggtgggcagggtggttactctcaagggggctaccagcaggcaccgcaagggccaactctggctgatgcctgtaaagtgctaggcgttaatccgagcgatgatgccgttgccatcaagcgtgcttatcgcaaattaatgagcgaacatcacccggataaattggtcgctaagggccttccgccggaaatgatggaaatggctaagcagaaagcgcaggaaattcagtccgcttatgatttgattaagcgagaaaagggatttaaataagatcggatttttattgagatgcttatcgataaaatttgcggtcgcaacttttgtgccatttcattcgatattaaggaaggtaggacgccttccttaataattcatcaaacacgatacttactttaccgttactcatcacttaaaaatcggcttcactgcggaaatgcataggcgtgccgaattctggatgagtgatacataactcctgggcatgtagctgtaagcgcggagccatcgccttggcctctggaggggcgtagaagccgtcgccgaggatagggtgccccatcgccagcatatgtactcgtagttggtgcgagcggccggtgatgggcgataatttcacccgagtactgccgtctgcatcccgggacagcaccagatactcagtttgtgcagatttaccggtttcataacacactttttgcttcggtcgattaggccagtcgcaaatcagcggcaaatcaataaccccttcgtcctgcgccagatgtccccaaactcgtgcaatataagattttttcggctcacgttcgcgaaattgacgctttaattcgcgttcggcggctttggtgagtgccacgacaatcacgccgctggtcgccatatccagacgatgaacggattccgcagccggaaaatcagcctgaatacgcgtcattacgctgtctttgttttccggtgcccgtccgggtaccgaaagcaacccgctcggtttgttaaccaccataatatgctgatcctggtacaaaatatgtagccagggatcgcgcggggggttatagggttccatgttcaatccgttaccaccttgctgcaattcgaggttttttcgatatggcatatcagtctggataaaagagccggaggttgccggctctttcttacacaaaagtgttactggtgagtgaccacaaccaagcggattgcgtcaagacgccagccagcctgattcaggttttccagcaccattttgcggttatgctccagcgcttcgagttcgtcatcacgaatattcgggttaacggctttcaacgcttccaaacgtgccagttcggcactcagcttttcatcggcttcttgcttggcggtttcgatcagcgctttcgcctgttcttctaccagcgcttccgcctgttgcagcatggcgtgaacctcttgctgaaccgcgttcaccagcttgcttgaggtgtggcgattgaccgcattcaactggcggttaaagctttcaaactctacctgagccgccagattggtgcctttgcgatccatcagcatacgtaccggcgtcggtggcaggaagcgggtcagttgcagatgcttaggtgcctgagcttctaccacataaaccaactccgccagcagagtacctactggtaatgctttgtttttcaacagagaaactgcacagcttccggtgtcgccggacaaaatcaaatccaggccgttgcgaataatcgggtgttcccaggacacaaactgtgcgtcttcacgggataacgcctgatcgcgatcgaacgttacggtgcagccatcctgcggcagaccagggaaatccggtaccagcatgtggtctgatggcgttaatacgatcaggttatcgctgcggtcttcctgattgatgccgacaatatcaaacaggttcagcgcaaagcttaccagattgatgtcgttatcctgattggcgatagcctcggccagttcctgaccgtgttcgccaccgtttgaatgcatttccagcagacggtcacgaccctgctccagttgttgcttcagtttgtcgtgctgctgacggcaggtgtggataaattcgtccaaaccttcctgttcggctggcgtggccagatagccgatcaattcctgataggcgctgtcataaatggttcggcctgtcgggcaggtatgttcgaaggcatcgagaccttcgtgataccagcgcactaaaatcgcctgtgcagtattttccagataaggcaccatgatttgaatttcacggttctggccaatgcgatccagacgtccgattcgctgttccagcagatctgggttaaacggcaaatcaaacatcaccaactggcaggcaaactggaagttacgcccttctgagccgatttctgaacacaacagcacctgggcaccgtcttcttctgaggcaaaataagccgctgcgcgatcccgctcaatcagcgataaaccttcatggaacacggcagcgcgaatcgcctcacgttcacgtaagacctgctccagttgcagcgcggtggcggcctgagcgcagataaccagcactttctcatcgcggttggcgatcaggtagttcagtagccattcaacgcgaggatcaaaattccaccaggtggcattttccccttcaaattcctgataaatctgctcgggataaagcatatctttggcgcgagcttccagcgatttcttcgcacccataatgccagagactttgatcgccgtttgatactgggttggcaatggcagttttatttcgtgcagtacgcggtgcgggaaacctttcacgccgttacgggtgttacggaacagaactcggctggtaccgtggcgatccatcagcatgtcgactagctggcggcgcgccgcttcgctgtcttctccgtcgctgtttgccgctttcagcagcggttcgatatcctgctcggcaatcatttcacccagcatattcagcttgtcgtccgccagacgctcgccgcccagcagtagcgtcactgcgtcagcgataggacgatattgctgttgttcgctgacaaaatcttcgtaatcgtggaagcgatccggatccagcaggcgcaaacgggcaaagtggctctgttggcccaattgctcaggggttgcggtcagcagcagtacgccagggatattttccgccagttgctcaataacctgatattcgcggctcggggcttcttcgctccaggccagatggtgggcttcatccaccactaacaaatcccaggatgcgtcggccagttgctctaaacgttgcttgttacgacgtacgaaatctaatgagcagataaccaactgttcggtttcaaatgggttgctgctgtcttgcatcgcttcggaataacgactgtcgtcaaacagtgagaagcgtaggttaaagcggcgcagcatctcaaccagccactggtgttgcaggctttccggcaccacgatcagcacgcgctcagcgcgaccagccaataattgctgatggataatcatcccggcttcaatggttttacccaaaccaacttcatcggccaacagtacgcgtggagcgtgacgctgaccgacttcgtaagcgatatgcaactgatgaggaatcaggctggcgcgaacgccgcgcagaccgctccacggtaaacggaactgctcgctttggtatttacgagcgcggaaacgcagggcaaaacgatccattcgatcgatctgaccggcgaataggcgatcttgcggcttgctaaaagtgagtttgctatccagcaacacttcacgcattgctacgccggtttcctcggtatccaaacgggtgccgatataggtaatcaatccgttttcgtgggtgacttcttccactttcatttgccagccttcgtggctgctgatggtatcaccggggttgaacatcacgcgggtgattggagagtcatttctggcatagaggcggttttcaccggttgcagggaacagcaaggtgaccatgcgtacgtcgatggctacgacagtacccagtccaagttcgctttctgtatcgctgatccagcgttgaccaagtgtaaaaggcataaattatcggctcgattttgggttgggcagttatttgtttaactagtctgtgtgtttgataaggttggctttattcactataaatttaattttattgtcgacgaatgacgccaacccttatcaactaactggcaatagtttaccgtccgcgcaggctgatggcctaagaatctgcctgaaaaaacgtgacaacctgtgtgacgtaggtggcagagtccgtttgcacggataaataacgacattatgattgatgcgcgatttggcaagggcgctatggtaatggaaggcgcgcccgtcgtcacctgtaaaaccacggaaaagtgattaaaaaagtcccatttgaccagtaatcaacgttgtaaaatcatcctgcagaaagggtagtatagcctcggctacgggttgtagctggcgggagaggtaatgatcgtaatcaatgggggaatgacgaatttccagcggctccgggccagacgtggtcatcacatagctgatccagccgccgttttggtattgcaaagggcgtccttgctgacgattaaactcatcggccagacgagccgcacgggcatgaggtggcacattgcgctgataatcatccagctttcttcgcagccgtttccgataaaccagcagatgatccagctcgccgttcagggtttgcgccacgtaatcgcgaatgtagtcctgatagggttgctgttggaatatacgttgataaagttcttgctgaaaagtctgagccagcggcgtccaatcggtgcgcacggtttctaaccctttgtacaccatacgatcgccttcgggcgtggtgaccaatccagcataacgttttttactgccttgctctgcgccgcggatggtgggcatcaaaaagcgccgatagtgagtttcaaactccagttctaatgcgcaggacaggccaaacgtctcgtgcaaatgtcgttgccaccatgcgttcacgtattccaccaattctttgccaatctggctggcttgctcgtcgctatgggcgtgtttcagccagacaaaggtggagtcggtgtcgccgtaaatgacctgataaccgcgatctgcgattaattcacgcgtttggcgcatgatctcgtgaccacgcagtgtgatcgaagaggccagccgaggatcgaagaaacggcagccgctggagcccaatacgccgtaaaacgcattcataatgattttcaacgcttgagataacggcttatttttctgttgtttagcggcttctcggccttgccagatttgtttaacaatggcgggtaggcagtgtttctcgcgagaaaaccaggcgttgcgaaaaccgggcactgaatgcgcaagcgttggctgatgcatgccttcgactaagccaacaggatctatcaggaaagttcgaataatcgacgggtacaggcttttgtagtccagcaccagcaccgagtcgtacaaaccgggctgagaatccatcacgaagccgccggggctatgttcttccggtaactcccctaaattcggcgcgacataaccggcccggtgcatgcgcggcaaatacagatgagtaaaggccgcgaccgacccgccgctgcgatcggcggccagaccggttacgctggctctttccagtaagaagctgagcaattcggttttggcaaaaatccgcgttaccaactcgcagtctttcaagttatagcgcgctagcgcaggtttatcctcagcaaagcgacgattgatttcatccattcgttgatagggggaatcgctatctttgccttcgcccagcaaggtttgcgcgacggattccagactgaaagagggaaaattccaggtggctgatttgagcgcttcaatgccgtcgataatcagccgcccagcggctgaggcaaaaaagtgcccctgtttaaaaccgtgctcgcgccattccagtgggttaccgccacgaccaaaacgcagtggaatctgatagcgatccgcatgtttttgcagtacccgcagatcaaattgcaccagattccagccgataatggcatcgggatcgtattgttccagccattgattcagtttttccagtagctgcggacggctggcaacgtattccagattgaaatccaacggttgctcatccccattttgcggccccaacatataaacttgacgctggccgcagccttccagtccaatactgtacaactcaccgtgctcgctggtttctatatccagagacagcagttttattggtggacgataatcttcggctggtttcattcgggtggacaataacgtgccgtttttatccggtagtccgctaaaccacactggtgcggtaataaaacgttccatcaggtagcgttccggcgggcgaatgtccgcttcgtagacattcactccgccttctttcagcagcttttccagccgcatcagctgacgatgttgttggcaatacagccctaaaaccgggcggcggtgaaaatccgtcagggaaagcggccgtaactgatagcggcgctcatcccgcaggatttgctctgccaacggcgcttgctctgcgggaataaaggccacggaaggctgaggcggcagccgaaccaactgtggcccattatcggttgccaaccagaattcaacttcagtgcctgccgctgtatcccgccaatggcgggtgagcaggaaaccttggcgcgcttgatccaccggattacctttaatgaatgctacctttaattcatgatgctatgaatgagtgttaactgccgtgtcttttagtatggttttttatacagtcattgtctatttgaatggttgccagatagcttccgtatgtttccaatagatttcgtcgcaaacactcaatcagttgaatcacagtgaattcagcagcagtacggaaatagcccggaaaaaatcattgattgacgggactatgaggtagctggacaatccctcgcgctttatacaatggataaatttatggaagcctatttagaacaccttttgacacaatcactggctttcacgctatttgtcgtcatgtttgtcacatttatcgaatctttagcgctggttggccttttgttgccgggaacggtgatgatggcgagcgtgggggcgttaattggaagcggtcaggttggattttatccggcgtgggcggcggggattgtcggttgcctgttaggagattggatttcctactttatcgggcgggcgtttaaacagccgctgcaccgttggtcatttctgaaaaagcataaaactatgctggataaaaccgagtatgcgctgcatcagcacagcatggcgacggtgttgatcggccgctatattggccccactcggccattggtgccgatggtcgccggtatgctggatctgccgccactaaaattcgctttgccaaatattattggttgcctgacttggccggcggtgtatttcttccccggtattttggctggagtggcgattgatatcccgcccagcgccaatagtttcatgtttaagtggctgttagtcttagtggcggtaaccgtttggctggcgggatggttgggctggcgctgggttcgctacggcaagcgtaagccagatcgtctgagtcgttggctgccgctggcgcgtttacgcgggttaaccatattgatgacgctggcggcaatcggcagctttatctggctgcacgtacagccgattatgccgatttaccgccatttgctgtggaaagtgttagccggttaaagttgaggtaatgcccagtacgcaggcctcagccaccgaaccttccaccaatgcctgagtcgggccatcgtaatagatgcgcccgtccactatcagtaacgttcgttccgcaatccgcgcggcatcgtccagattatgggaaaccataagcaaagtcagttggcgacggtcgcaaacctgttccagcagttgcagcatttcggtgcgtaatgccggatcgagtgcagaaaatggctcatccaataacaggatcggctggctgcgaaccagacaccgcgccagcgccgctcgttgccgctggccaccggaaagctgtgctggcaagcgatccagacagttctccaatcctacctgttgagcaatttgctgcaataactggcgttgttggttattcagctttaatcccggatttagccccagcccgatgttttgctcaactgtcaaatgtgagaataaattgttttcctgaaacagcatggaaaccggtcgcttagctggagggctaccgctgtgctcttggttattcaatagcatacgaccactgactggcgtaaggaacccggcgattaggctaagtaaggtgcttttacctgctccgctggggccaagaatagccacgcgctcgcccggattaatttgcacatcaaagcgcataggcaagtggtcatataaataggtaattttctcaagctttagcatggcggcccggcaatttctcaataagggtaaacaggaggaaacacaataacagtagcagtagggcggttaccgcgccgtcgttgctgcgataggcaccaatttgctgataaagatagaacggcagggtacggaaatgctcgttgccaaatagcgcgacgacgccaaaatcaccgatagatatcacgctggcgaaggcgagtgcctgagctaatggacgttttaaggcgctaaattccacccagcgcagtcggtgccaaccacggatatccagcgacaggcatagcgggccgtagcgttcagccaaatcgcgcatcgggttatccagtactttcagcgcataaggcactgcaatcagcgcgttggtgagaatcactagcgcgtagggggattggggtaaacctatggtgtcattgagcaacaggaagaaaccggtggctaaaacaatgcccggcatcgccaatatcaccattccgctcatttccattgcctggccgaataccattttatctcgcaactttaactctcggctgctccacagcaacatcatggtcagcagtacgcagagcaatccagcagccacggcgatagtcagcgaggtcgttaaagcctgccatagcgccggttgttgtaatacgctaaatagggttttattagtgccgtcaatgaccactgccagcagaggtggtaacagcaataatagcgtgccgatgatgagtacgctgtcgctaacccgttgccacaggctgtcttgcgggttacgccagctttgagcatgagtgtttcccaccgctagcgcgctatttagccgctggctcagtagcaccaaccccagacagcaaccgagctgaatcagcgccagcagcgccgctcggcctaaatcgtagtcgtagctaagcgcctgataaatagccagctcaatggttgtcgcctgtggcccgccgccaagagacagcacggtagcaaaactggcgaagcacaacataaagatcagcgcggcagtaggcagaatctggcggcgcaaataaggccattccacccagcggaaatgctgccaaccgttcattcccaactgagcggccaattggcgctgttccaccgcaatactttccagtgattgcagtaacaggcgggtagccagcggtagattgaaaaagacatgagccagcagaatgccttgcaaaccataaggggaaaaatggtaatccagccctagccagccgaaaagttgcgctaaccagccttggcgcccatagacgctcaaaataccaaatagcgccaccaataccggcagaactaaggtcatggcgcataatcgcagcaacagttgacggccgggaaagcggcggcgatacagagcgcgagccagcagaatagcgggagccaccgagaacagggccgataaaaaagcctgccagaaggtaaagcgcaccacgtgccacaaatagctgtcctgccatactccgatccagtcggcttctggggcatgacgccagatggcgctaaatgccagcagcgccaccccaaccagcaggaatgaagcaactagtcccgggcagagccaagcggggattagcggctgacggcggattgccatgcctgaatccatttgctgcggttatcggctacttctttcgcgctgaattccaacgcttttttgggcacggtcagagtgttaaacccggccggaagatccattttaatcacgggatacatccagtttccggtaggaatatggttttggaaagccggagaaaccataaactgcatgaatttctgcgccagctccggttgtttgctcgaggctacctgcgctgcgacttccacttgcaaataatggccttcactgaaatcagcagcagcgtattgatctttcttttcttcaatcaaatgataagccggagaagtggtatagctcatgacaaaatccgcttcgcctttcaggaacaggccataggcttcactccagcctttggtcacggtcacggtttttttcgccagtttttgccatgccagcggcgcttcgtccccgtagactttctgcatccataacagtagccccagccccggcgtgctggtgcgcggatcttgataaataaccttccacggcgagtcattttcgatcagttcatgcagacttttcggcgggttttttattttttccttgttatatacgaaggagaaatagccgtagtcatacggaataaatgtgctgttatgccaggcttcggggagcgccagcttgctggtatctatctgacttggcgtaaataatccggttttctctgcggattgcaccaggttgttatccaaccctaatactatgtccgccggacttttctttccttccattcgcaggcgatttaacagagaaacgccgtcttccagtgcgacgaatttcagctcgcagttgcattctgcttcgaaggattttttgatagcaggacccggtccccaatcagcggcaaaggaatcgtaggtgtaaaccgtcaggacaggtttggtggcttcagccgcggtggcggcggctgaaatcagcagcagacagggaagaattcgtttaaacactttgcactcctcaaaaagaaaggtggcaaaggtatctgaggcattggtcaatatccgcaagttcatcatattgctgaatgacgctctcaaatcccttcgccggtattaaccggatcaggttcgacgggtttactctcagcgaatattggccgcggtttgccgctaaacaatttttcgcaccccgttgagacggcgctattgtagagggatagccagactagtgaaagtctgtttattcctccggcggcgtaaaccaggccgatttgaaatcaaaccagcctagggtattcatccgcacgccacgcatgctgtgctgtccaaacaattctagccagtgatggaataacgggtgaaattgatgattgctgaccaatcgttggctccattccgccatgggcaaccggttattgcgccactgcgcgacgtcttgatacaactcttcactcaaacagtgttgcaaaagaggaagttcatataaggtggcaaaaatggaaaattccaccggcagatagaagttggcgctacctagccagatatcgcttttggcttccccccgataccagctggcgtaatccagttcttgtaccaccagtttcacgccttgcgcggccagtacgtctctcagcgtttggctaatggcgttgaattcaggatgttcggtaaaacaggttacggtgagctcagttaattcgaggggtttggcagaaggtgggttcagacgattatggtgccagcgcggcaaaataccgtaggctggcgaccagtagcgctgatacaacgcatcggcatggctgagtaaagccaccggtgtgatcagttcacatagccagcgtctcacgtccggttggctggtgagcggggagcgttgatcgaaaaggagaaagtagcagccttcttccagccgactttccaattcgttgcggctggtatcatccgcctgtaaatgaacgccagaagacactaaatcttctgacaattcaggtaacacccaaatattgacctcatcaatgagtgcgcgaaaaccgaagtagttatcgaaagcctgaattttaaattgattttgccggttgcgaatcaccgagtaagggccggtgccgataggataacgcgaaaaatcaggtagttcaggccattcctgcggcaaaatcatggcgtgaacgctgcccagtagccaagggagccaatagtctggcgtattaagttttacatcaatgacataaggcgtaggagaggtgatttccgtgatgtgggaaaacagcggctgtgtggtcaaacgctttaatgacgtaatcacatcctgcatttctaattcacggccgtgatggaagtgaatcgctggacgtaaataaaagcgccaatgcaagggggttagcgtttgccagtgatgagataaatctggctcggcttccccattttcctcatttatgcgggttaaaccattaaaaatctgccggacaatatgggtttctgaacggcgcagagcggaaccgggcaataggttttgtagttgacggtagtaaagcactctaagtatatgtttaccttgtctaaaactcctccctagctgtgaaagaagcatctggcgaaccgcctgtttatctcccaccaattgcacgagctgatcgatatgatcctgctccagcaactcctctgcccgttgctgttgcagggccagaccggtgtacaaaaaggtgagctgcgagcgttttcctcgaccagcctctgcctgccagcttagccaacccgcttgctgcatattacctagtaacgaacgaacgtggcgacgcgagcaatttagcacttccgccaattgttgcagggtggtttccgtcggtttaccgccgtaatgttgccacaaacggatgaactggtgttgcaggcgagaagtagacataaaagaggaactccacggcaaaatgcatcaatttatctttccctatattacgcagataattatcagtaatgaaaggggaggagcatgatgaaaaagtgcttaaccagacagttttatcagcgctattttagacacgtcagacagcagcaggccgattggttgagctgggtaccgatggaatggcggttaaggatgctggcagatgtcacccaatgggacattcagcacatgccggaaaaagaataccgcaaacatatttagttcgaaccgggttagtaccgatggaatttggatttaactttcatcgttcggcagggacgctgcctattatcaaaaatttctgagtaatggtgcaattcaccagccagtggggcaacctgctggcttttttattgccgagtaatttttatctatagagttattgttgctgttcaccgcaatgtgccttctgtagcatatgaatctaaagtggtttctggcgatggagcctgtaatgaaatctgctctgacgtattcccggcggattaatcccgtctttattgctttttttgtggtggcttttctttccggcatcgccggtgcgctgcaggctccaaccctcagtttgtttttaactacagaggtcaatgtacgccctctatgggttgggcttttttataccgttaacgctatcgccggaattacggtgagctttgtgctggcgaaacgctcggatctgcgtggcgatcgccgcaagttaatcatgctgtgctacctgatggcggtgggtaactgcctgctatttgcctttaatcgtgattatctgaccctgattaccgctggcgtgctattagcctcagtagccaatacggccatgccgcagatttttgctttagcgcgggaatatgccgataactcggcgaaagaagtggtgatgtttagctcgataatgagagcacaattatcattggcttgggttattggcccgccgctatcgtttatgctggcattgaactatggcttcactttgatgttcagtgttgccgccggaatatttgtattaagcggtatcctggtatggttcttattgccatcggtaccgaaagctgaagtgccgaaagacgcgccggtagtgattaatgcaaagctttttgccgataaaaacgtgctgttgctgttcattgcctcgatgctgatgtggacctgtaacaccatgtatatcatcgatatgccgttatacatcacttcagatctcggtttgccggaacgtttggccggtttactgatgggaaccgccgctgggctggaaatccctattatgctgctcgcgggttactcggttaaacgctttggtatgcgtaaaattatgctgtttgccgtggccgcaggcatcgtgttttatgttggattgatcctgtttaaattcaaaactgcgctgatgttattgcagattttcaacgccgtgttcatcggtattgtcgccggtatcggtatgctctattttcaggaattgatgccgggcagggccggtgccgcaacgacgctgtttaccaatagcatatcaaccggcgtaattttagccgggatactacagggcgtgctgacggagaatctggggcattacgcggtttattggatggctgcgttactggcgacagtgtcattggggatatttagccgagtcagggctatctaaatcctctgcatctttcactccaccgcggtgttactgccttcagtcgtctcggtcacttggttgcgcgccaagtgaccgagcgtagcttgctgaaaattaacgtaaaaattcgggttgctgctgctcataggccgaaatattagcctcgtgctgcaatgtcaaaccgatactgtccagcccattcatcatgcaatgacggcggaaaccatcgatctcaaaggcataacttttgcctccggcgctgacggtttgcttttctaaatccacgacgaactcgataccttcctgactttctaccaactggaataaagtatcaatatccgcttcgcttaaagtcaccggtaataattggttattgaatgagttaccgtaaaagatatcggcaaaacttggggcgataaccaccttaaaaccgtaatcggtcagtgcccaaggggcatgctcgcgagatgagccgcagccaaaattttcgcgcgccagcaaaatagtcgccccctgatagcgcgggtgattcagcacaaattcagggttaggcacctgaccggcatcgtccagaaaacgccaatcgttaaacaaatgttggccgaagccagtgcgcgtcactttttgcaaaaactgcttaggaatgatggcgtcggtatcgacattcgctgcatccaacggaacgaccaaacctgtgtgttgaataaattttgccactatggtgtctccgattaatgtgtggacgcggataaatcgcgcacgtctgcaaaatggccgctcaccgccgccgctgccgccattgcagggctgactaaatgggtgcgcccgcctcggccctggcgaccttcaaagttacggttactggtagaagcgcagcgctcgcccggttccaaacggtcgttattcatcgccaaacacatggaacagcccggcaagcgccattcaaaaccagcgttgataaagatctgatccaaaccttcggcttccgcctgcgctttgaccggcccagagccaggaaccacgatagcttgtacgccctgagctacttttctgccctgtgcgatagccgccgcagcccgtaaatcttcaatacgtgaattggtacaggaaccgataaatactttatcgataggcacgtcagtcaacttaatgcccggacgcaagtccatataagccaaagctttttcagccgacgcgcgctcaaccggatcgctgaaagactcaggtgctggaataatctggttaacggcaatgacctgacctgggttggtgccccatgtgacctgcggtgcaatatccgctgcgttcaatgtcaccacggtgtcaaatttggcatcggcatcggatttcagcgtgcgccagtagatcacggcgtgctcccaattcgcaccggttggcgcaaactggcggcctttcaggtagtcaaaagtgacatcatccggcgcgaccaaacccgctttagcacccatttctattgccatattgcataaggtcattcgaccttccatgctcaaggcttcaatcgcgctgccgcagaattccactacgtgcccagttccgcctgcgctaccggttttaccgatgatcgccaatacgatgtctttagcggtaatacctgcgccaacttcaccgttaacttcaattttcatggtcttggcgcgaccctgcttcagcgtttgcgtcgctaaaacatgctcaacttccgaagtaccgataccgaaagccaaagagccaaaggcaccgtgagttgcggtgtgagaatcgccgcatacgatggtcattcccggcaacgtcatgccttgttccgggccgataacgtggacgataccttggtaaggatggttcaagtcatataaagaaacgccaaattcggcacagttcttgattaattcctgcatctgaattcgcgccatttcaccgctggcattaatgtctttggtttgggtagaaacgttgtgatccatggtagcaaaagtcttacccggctgacgtaccggacggcccatagcacgcaggccgtcgaaagcctgtggtgaggtgacttcatgcaccaaatgacggtcgatatacagcaatggcgtttcgttcggggcttcacggacgatatgcgcatcgtacaatttttggtataaggtcttggccatgttaaatcccctcagcgataaaggatgcgatgatatcgcccatttcattggtgccaatagcttccccatcacccgccaaatcagcggtacgatagccttgttcaagcgccagattaactgcgcgctcaatggcgtcggcggcatcgtcttcgcctaaactgaagcgtaacaacagtgatgccgataaaatttgcgcaatcgggttggcgatatttttcccggcgatatccggcgcggagccgcccgctggttcatacaaaccaaagccctgctcgttcagactggcagagggcaacatgcccatagaaccagtaatcatggcgcactcatcggataaaatatcgccaaacaggttggaacacagcaatacgtcgaactgggatggatctttaatcaactgcatggtggcgttgtcgatatacatatgggacagcgcgacgtccggataatctgcggcaatggcattcaccacttcgcgccacagaatagaactttgcaatacgttggctttatcaatcgaagtgactttactacgacgcttgcgcgcggattcaaaggcaatacgggcgattcgctcaatttcaaaacggtgataaacctcggtatcaaaggcgcgctcatacatgccttggccgtcgcgacctttcggttggccgaaatagattccgccggttaattcacgtacgcacagaatatcgaagccgcgggcagcaatatcgctgcgcaatgggcaaaactcttccagaccctgatacaaacgggcagggcgcaggttgctgaataacttgaaatgtttacgcaaaggcaacaaagcgccgcgctcaggttgttcgtccggcggcaaatgttcccatttggggccgccgacggagccgaataaaattgcgtcagcctgctcgcagccgttaatggttgtcgtaggcaaagggcaaccctgacgatcgatagcagcaccgccgacatcataaacgctggtggaaattcgcatgttaaagcgctggcggactgcgtctaacactttgtttgcctgtgccatcacttctggaccaatgccgtctccgggtaaaacggcaatatgataaattttcgtcatgttcacaccatttcctgagtattttgttgcaagcgctgtttttctatttctacctgctgagcgcgccagatgttatttaatacgtgaaccaatgccttagcggaagattcaacaatgtcagtggccaatccgacgccgtggaaacggcggccttgatgttccaccacgatatccacctgacccagcgcatctttaccctgacctttggcagataattgatatttcactaattcaatcggatattcggtaatgcggttaattgcctgataaacggcgtctaccgggccgttgccggtagcagcttcggattttatttcttcgccacacaccaatttcactgacgccgtggccatcacgctggagccagattgaacgctgaaatagtccaaacggtaatattccggttcttcctgttgtttattaataaaggccagagcttctaaatcgtaatcaaatacctggccttttttatccgccagtttcaggaaagcgtcatataaggaatccagatcgtaatccttatcctgatagcccatttcttccatacggtgttttactgcggcgcggccagagcgggaggtcaggtttaactgaacttctttcaagccaatggattccggcgtcatgatttcgtaattttcacgatttttcaggacgccatcctgatgaataccggaagagtgagcaaaagcattgctaccaacaatggctttattgccaggaattggcatattgcataatttactgaccaactggctggtgcggtagatctcctgatgattgatattggtatgcacacccagcatttcgtggcgcacttttatcgccataatcacttcttctaatgaacagttaccggcgcgttcgcccaaaccgttaatcgttccttcaacctgacgcgcaccagcctgaacggcggtgatggagttcgcgaccgacatacccaaatcgtcgtggcaatgaactgaaataatggctttatcgatgtttggaacacgatcatacaaattactgattattccgccgaactgataaggcgtggtgtaacccacggtatcagggatgttgatcgtggtcgccccagcgccaatcgcggcctcgacaatccggcacaagttatcgattggcgtgcggcctgcatcttcacaggagaattcaacgtcatcggtataatgacgagcacgtttgaccgagtgaacggccatcgccataacgtcttcaaacgtgcgctttaatttggattcaatatgtaacgtcgatgtggctaaaaatacgtgaatacggaaagcctcggcgatacgcaaggcttcggcggctacatcaatgtctttatcgacacagcgcgccaaggcgcagactctgctgtttttgatttcacgggctatggtatgcaccgattcgaaatcgccaggggaagaaacgggaaagccaacttccataacatcgacgcccatcctttccagcgccagcgcaatctgtaatttctctttcacgctcaggctagcctgtaacgcctgttcgccgtcacgcaaggtggtatcgaagataatgacttgttggctcatcgggtaattccttatttttctgagtaacttttttatttagcgcgcgacgggtaaaaaaaaacccgcgcatttgcgcgggtttctgaatcttgatggctgaatcagttctgatttccgtccaccaacataccgcgcaagtaagatgcgtttagtagtaggcctagtagacggttggagtagaacataattatcagtttctcatcggttaattgtttcgcttcctaatttgatacgttatttcaacaggagtgtcaacttttgtttgaagtggcgacttaaactggtttgaggtttttgtgcgtcttgtttttagcattaaatactatactgattaatattttggatttatattttgcttggttgtttttggtgttattgattgtttcacgagtgtgattaaaagtgggtgattatgcttaacattaatgctccgttcgattcctgcctcttagatgaatagttaacctttgtttaagtaaaattatcctctgacaaacttgataaggtggataaaaatgacagatagcattaatgtaataaggcatcttacgacgtccgctattagcgttacttaattaccataaatatatttatatataatgagagttagcatacacagcgtttatatttgtcaacctttagtttattaattcacacttaatgtttattatgtcaatgtaaaaaacttaaccatttaactgttgttagcttattttaagaactaataaggtttaatttatgaaattattatttaataatggcatgattatgaatcattgtatcttataaggtgagtgtttgtatgtcacttggaggttaatcatcacatttctggaaattagtgattccagtgataacatgccacgttccactttttatttatctatggaaactattctgacaataggatgcgttagatgtgatacgtggtttcacattttatacaaggacgagactcagtggttatctttcctaacgataacaattgagatcattggttatattaattgtgagacatctaatatatcagtaattaacttactgctgttaaaagatagtcatacacctaatagaaccatctgcataaagcttagtggagttaagcatgtctgaacacaacttggtaactgcaaatccagtaactcaaaaagaatcgtttgatgtccatttgcgtagcgttgatcttaatttactcacggtttttgatgccgttatgcaagagcagaacgtgacccgcgcggcgcaatctttggggatgtcacaaccggcggtcagcaacgccgtagctcgtttaaagctgatgtttgatgacgaactctttttccgtagcggtcgaggtattcagccgacagtccgagccaaacagctgtttggaccggttcgccaggcattacaattggtccataatgaattgcccggcgttgggtttgagccaaaaagtagcgaacgtttgtttaatctctccatttgtagtccgcttgatgttcgccttaccgccgaaatagtggggcgagtaaaacagtgcggcccacacgtacagttatcaattaagtcatacttaaatgatgatattgaacatcagttgcgctatcagaaaaccgactttgtgatcggttataccgaatttgaacggcctgaatttaaacgcacacttttatttaatgatgaattggtattggctgtttcaaaagatcatccgcgaataaacgaatctattacttcagagcaactttttgaagagcaacacgccgtggattctttggataaagtgggttcatttagcaagaactattatgaggctaatgacttgtcccatactatttcctatgaaagcacggatatgaatagcgttcttaacgttgtatctaaaacaaattacgtggctattgttcctcgctggttaattaatatatgtagtgaggaatctaagctaaaacttattgaattaccttgggcgaatactacacgagcctgttatctaacctggcatgaatctaccgatcgcgataaaggtcatcagtggatgaaagccttattaagccaatttagcctttcaatttaaactttattaacggctactggcggtgttactactggggtactatgtacctcagtagttttgttacgtagcggcactcattaaaattttatctccgttattctgtgtttattctcgcaatatttccctcagatgccagtctgccatttgggatagacctcaccaatttcactgaaatccgctgttaaatcagtttcacctcacattcttacgccgaaatttgtttgccatagggctaagagtgagtagactgcgcgaaaaaagtgaacacctgtaagccgaaactttggtcaaaggggagcttcatcctatgctttacgtattcactacatttttttatttcaaccctgggcagcatttctatgatagataaattgcagcaataccacttggtgcgtcgattgcatcagcaaattaaacatcgtgctgatcagacggccttccgccagtggtctcccgcagcagaaactcaacttagctggcagcaagtaggccatcaggttcaacgcatttctgctgcgctgctgtctaaaggtgtagcggtgcaggacaaagtgggtatttttgctaataacagcatggcgtggtctttagttgatttggctattttgcaaatccgtgcgatcagcgttccactttatgcgaccaatacgtcggcgcaggcggcctttgtcgtcaatgacgccgatatccgcattctgtttgtcggtgagcagtcgcagtatgatgtggcgataacgctgaaaagcctgtgtccgcagttggaaactatcgtagcgctggatccgacggttgatttacgtggctgcgagtatgctcagcaccttgcttcattcgacatcgctcccgatgaaacactgcagtttttgctgaatatgcgtatcgatagctgtgatttagacgatctgtttaccctaatttatacctcgggaaccaccggtgaacctaaaggggtgatgctggactaccgtaatatggcggcgcagctatatttgcatgatgagcgcttaacgctaactaccgatgatgtttccctgagtttcctgccgctttctcacgtttttgagcgcgcgtggagtttctacgtgatgcataccggcgcgcaaaatgtctacatcagtaatactgactgggttcgtcaggcaatgcaggccgttagcccaaccgtcatgtgtgccgttcctcgtttctatgaaaaggttttttcggcgattcatgagaaagtcgcgcaagccaaaccgcatcgccgggcgttgttccactgggcggtaagttgcggtgagaaacaattccgccgtcagcaggaagcacgcaaatcctcatggttttccgatcgtttgttcgctttggccgatcgcttagtgctgcaaaagttgcgtaatgtgctcggtggtcgcgtgcgatttttaccggcagccggtgcgcgcctagatgacaatatcattttgtttttccagtccattggaatcaatatcaaatatggctacggcatgacggaaacctgcgctacggtttcctgctgggaagaaaatgatttccgctttggttcaatcggcaagccgttgccgggtattgaagtgcgtctcggcgcggaaaatgaaattcaggttcgtgggccaatagtgatgcgtggctacctgaataagccgggagaaacggcggcgacctttactgaagacggctggttaaaaaccggcgatgcgggtgccattgatagcgcaggtaacctgtttatcaccgaacggttgaaagatttgatgaaaacatcggggggcaaatacattgctccgcagatgatcgaaggcaccttgggtcaggatcgttttatagagcaaattgccgtgatcgccgatacgcgcaaattcgtctctgcattgatcgtgccttgtttcgaatcattggaagaatatgccaaatcgatcaatttaaaatatcacgatcgtctggaactgctgcgtcatagccacattgtggaaatgtttgaacagcgtttgaaagatatgcagaaagagttgtcgaaatttgagcaggtaaagcgctttacgctgttgccaaaggctttctcaatggagtctggcgagttgacgccaacgcttaaactgcgtcgcaaaattatttctcaacgctatcagtttgagattgattctatgtatcgtgattaatatgctgacccattaatcggatgagcgatggttatctacaagccctgcgggcagcatctggaaaccaggtgtagcacgcggggcttggtgttttttgacgccagcttgctcttcccatcgttcttgtagcgcgaatcacggttttgctcaatattccggcaaaagtcattacctcatttagttctgttattgattcaccctccgacacaatcccgacaaaatgtacggtcttgctagtgttttatttttgtaaaattaatgaatacagcgtgtcacagattgaacctcctcttagcacctgatttgccgtttgcctgctagaaattctgacgttatgttaattaatcctattcgaaaaataaccagagttgggcctcgtgcctttcctacaggacgacgtagaaatgtttttctgttgtccaaaaaagtaaaactaagcccggaggcaaaaccatggagatgttgtcaggagccgagatggtggtccgatcgttaatcgatcagggcgtaaaacatgtattcggttatcccggcggggccgtacttgatatctacgatgccctgcacacggttgggggaatcgatcatattctggttcgtcatgaacaaggtgcagtacacatggccgatggctatgctcgtgccacgggcgaagtcggggttgtgctggtgacttccggccccggtgcgaccaatgccataaccgggattgctacagcctatatggattctattccaatggtggtgctgtcagggcaggtgcctagctcgctcattggctatgatgcttttcaggaatgcgacatggtcggtatttcccgtccagtggtaaaacacagttttctggttaagcgcaccgaagatattccttccgtgctgaaaaaagccttttatctggcctcaagtggacgccctggtccagtagtgattgatttgccgaaggatattgtcagcccggcgctgagactgccttatgcctatccagagcaagttagcctgcgttcatataatccaacggtacaaggccatcgcgggcagattaaacgcgcattgcaaaccattctggctgccagaaaacccattatgtacgtgggcggtggggcgataaacgccgcctgccacgaagaattgctcactctggcagagaaactgaatcttccggtgacgacgtcgttaatggggttaggtggtttcccagggacacatcgccaaagcgtaggcatgcttggaatgcacggtacttttgaagccaatatggcgatgcacaacgcggatttgatctttgccgtaggggtacgtttcgatgatcgtactacgaataatttggctaaatattgtccgaatgccactgttctgcatattgatatcgacccaacttctatttcgaaaacggtaaatgccgatattcctattgttggcgacgccaaacaggtgctgaagcaaatgctggagctggcgacacaaatcgactgtgcgcaggatttcgatgcgcttcgcgattggtggcagtctatcgaacaatggcgcgctcgtgattgcctgggttacaacaaagaaagcggcagtattaagcctcaggcggtaattgaaactctgcatcgtttgaccaaaggtgatgcttatgtgacttctgatgtcgggcagcaccagatgtttgctgcactgtactatccgtttgataaaccgcgccgttggatcaactctggcggtttgggaaccatgggctttggcctaccggcggcgctgggcgtcaagctggcgttaccggatgaaaccgtggtttgcgtaaccggtgacgggagtatccaaatgaatattcaggagttatcgacggcattgcagtataacctgccggtgttggtgctgaacctgaacaaccgttatctgggcatggtgaaacaatggcaggatatgatttactctggccgccattcgcaatcctatatggaatctctgcctgattttgtcaaactggctgaagcctacggacatatcgggatcgccattcgtaccccaggcgagctggaggcaaaactggccgaagcattaacgctgctttccgaaaccaatcgtctggtatttgtggatgtcaccgttgatgaaactgagcacgtttacccgatgcaaattcgcggtggcggtatggacgaaatgtggttaagcaaaacggagaggacctaatgatgcgccggattttatcagtattattggaaaacgaatcaggggcgttgtctcgggttgtcggcctattttcgcagcgcggatataacattgaaagcttgaccgtggcacctacagacgatccaactctgtcccgtatgaccatccaaaccgtgggtgacgaaaaagtactggagcagattgagaaacaactgcataagctggtggacgtattgagagtcagcgaactggtgcccggtgcgcacgttgagcgcgaaatcatgttggtgaaactacaggctagcggttacggacgtgaagaaatcaaacgttgcaccgagattttccgcggccagatcgttgacgttaccgcgacgctgtacaccgttcaattagcgggaaccagcgacaaactggacgcatttcttaatgcggtgcgggaagtggctgagattgttgaagttgctcgctccggcattgttggcgtttctcgcggtgaaaaaattatgcgttaagccgaaatcaggcatataaacgagataaatctgaggctctgctttgaagcagagctttttttttgcatttttaagcctgatagtgacatcctaaggtgaaagcggttgctcaatggagtgttctgcggttagatctatcatgggttatatccatagttaaattatgtatataaaacccggcagacagatctgcttttcataactttacagggtttataaggggttaacgtgaaactggatgaaatcgcgcgtctcgcgggtgtttcgcgcacaacggccagttatgtcattaatggcaaagcgaagcagtaccgggtcagcgataaaacagtagaaaaagtgatggctgtggtacgtgaacacaattatcaccctaatgccgtagcggcaggtttgcgcgcgggcagaacccgatccattggtctggtgattccggatcttgaaaataccagttatacacgtattgcgaattatcttgagcggcaggcgcgtcagcgcggctatcagctcttgatcgcctgttctgaagatcagcctgataacgagatgcgttgtattgagcatctgttacaacgtcaggttgatgcgattatcgtttcgacggcgctgccgccagaacatccgttttatcaacgctgggtagataaacccttacctatcattgcgttagatagagcgttggatcgcgagcactttattagcgttgtgggggccgatcaggacgatgccttgatgctggcgcgagagctacgcactttccctgcggaatccgttctgtatctcggtgctttaccggagctttcggtgagcttcctacgtgaacagggtttccgcgaggcctggcaggacgatccgcgtaaagtggattatctgtatgcaaatagctatgagcgggaagcttccggagtgaagtttgccgaatggctgaaaactcacccaatgccgcaggcgttgttcaccacttcctttcaattgctacaaggcgtgctggatgtcactttgcagcaaagtggccgcctgcccaccaatctggctatcgccacctttggtgataatgagctgttggattttctggaatgcccagtgttggcggtggcgcagcgtcaccgtgacgtggcggaaagagtattggaattggtgctggccagtctggatgaaccgcataaaccgaaaccgggcttgacgcgtattcgtcgtaatctgttccgtcgcggtagtttaagccgcaaataacgcgctgaatactttcgctaaaatgcaatcgggcaccttaatcggtgcccgaatcatatttgtcgctgttacttcaatgcttgtctcacacgtacccggctacgcggaacaggcggcggcaatattccagaaaatagccgtaggccacgcccataaccatagaaacgaccgcattactggctactgccgtgacgatctgctggaaatctgcaccgaccgtccacagaataatggcgtaaaccggagactgaaaactgacgtaggccagtaggtcggccagatttttcgcccaaaaatgttgtcccgcgcatcgttgagcgaaacggataaaactgtcccgatacatgccgtaaggccaagcaatcaggatgttaaccggtatggaaagcaagcgtgaagaaagcgactgctcaaaggtcatacctgaaatcagtatttcaatcgccataccggtgataaagcaatacaccacaagagcaaaggtatctgcaacggcgctacgtaagcgagaatcagtagaaaacatcgtcattacctcccagattgggggaaaatccgttaataggttaaatatgcacagctattattggtggtatgtttctattttttgttggtttatggggtattatttggtgttttgtttttactgtagtttacatgactgctttgtttaatataactagctgaaaatttctatttttaacatttgtctgatttttatacttccaactgacctgtaaagacttttttatggtgaattacgcggagggttgagtgtttattatttaaaaacaatgaattaagttcgctggtggttttaagcgtcaatggggaatttgattagcgcttaatagccatattgaaaggcgggaaaaatacattggcgctgcgctactaatttgggacttttcttaagatgcattctcttattaaaaagcggcgggtaatcagcggctaataatttatttcaaaatagattcatattcctctgagtaattgaagtaaaatgcgcccacggtgaacgcctggtaattttaatgggtattatttacgaagattatccgcaggaatgttctgcattaacattccccggcgcagccagtcactgcgggagataggcctaattcctaatattttgcattgtgcaatttttatactggaaatgagacatcccttgcagaaggaattaatgtgacaattaattgctaaattaatcgttatttaatcagtaaaatcatccggcggaaaaatagcccgtttatcatgacgttaatttccacgctacttgctgaaaacgccccttctacaagatatatctcaaaatacacccataaatattgccaaaccgcatctgctctggcttgacaaggttttcataccatccgtaaactctttaatgtggggatttgtgggataaagtggcaaataaggccatgaaggggtgactcaacgatgtttcgtggggcaacgatggttaacctcgacagcaaagggcggcttgccgtacctacccgttatcgggatttgctgaacgaggaatcgcgaggacagatggtctgcactatcgaccttcaccaaccatgcctgttgctttatcctttgcccgaatgggaaatcattgaacaaaaactttctcgtctgtcgagcatggttcctgccgagcgccgtattcagcgtttgctgttggggcatgctagcgaatgccagatggatggttccgggcgtttgttgattgcaaatacgctgcgtcaacacgccgggctgagtaaagaagtgatgctggttgggcagttcaacaagtttgaactgtgggatgaacagacctggtatcaacaagtcaaggatgacatagacgcacaacagtcgactcaggaacctttatctgagcggctacaggacttatcgctataagcatggtagataattataagcacacaagcgtgctgctggatgaggcagttaacggcctgaacattcgcagtaacggcatttatatcgacggaacttttggtcgtggtggccattcacgtctgattctgtctcaacttgggccggaagggcgtttgatagcaattgaccgcgacccgcaagctattgaagcagcgaaatccattaccgatccgcgtttctcaatcgtacacggtccgttttctgaattagcagattatgtgcgggaattggacttagtcgggaagatcgatggcgtactgttggacctgggcgtttcttcaccgcagttagacgatccagaacgcggtttttcctttatgcgtgacgggccgctggatatgcgcatggatccttcgcgtggcatttctgccgccgagtggttgatgaaagctggcgctgacgacattgcctgggtattgaaaacctttggtgaagagcgctttgccaaacgtctggctcgcgccattgttgagcgcaacctgacccagccgatgactcgcaccactgagctggctaatttgattgctaacgccagcccattccgcgaaaagcacaagcatccggccacccgcagtttccaggcgattcgcatttatatcaacagcgaactggaagaaatcgaacgagcattggaaggtgcgctggaagtattagctcccggtggtcgtctctccgtcatcagtttccattcccttgaagatcgtattgttaaaaactttatccgtaaccaaagccgtgggccgaaagtgcctgccggtctgccgttaacggaggagcagttacagagtctgggcggacgtaatttgaaatccgtagggaaaatgatgccttccgacgcggaagttgcggaaaacccacgggcgcgtagctccgtactgcgttttgcagagaggattaacgcgtgataggcaacgaacgccacggcttggtaggggtcattggcggagatttactccgtaatgccaagattccattgattctgctggttgcggtgttgatctctgcggtgttagtggtgacaaccgctcaccgcacccggttgctgaccgccgaacgtgagcagctggtgctggagcgtgatgctctggacatcgagtggcgtaacctgattctggaagagaacgccttgggcgatcacagccgggtcgagagtatcgctactgataagttaaaaatgcagcacgttgatccagcacaagaaaacattgtggttaaacaatgattaaatttgcactcaccatgactcggagtagccaaggtaacgcatgaaagcagcgcgccccggtaagttgaaacggcaggaagaacaagccagctttataagctggcgttttgcattgctgtgcggctgtattttactggctttggttgggctgatgctacgcactgcctacctgcaagtgatcaatccagacaaattggtacgggaaggcgacatgcgttcgctgcgggttcaatccgtacctaccgctcgcggcatgataagcgatcgagccgggcgacctctggcggtgagtgttccggtgaatgccatttgggccgatccgaaagaactgcaggaacgtggcggaattacgctggatacgcgctggaaagccctgtccgacgcgctggaaatccctctcgatcagttggcttcccgcattaacgcgaatccgaaaggtcgctttgtttatctggcgcgtcaggtcaatccggctattggtgactatatccataagttgaaattgccgggtatctatctgcgtcaggaatcccgccgctactaccctgcggggcaggttatggcgcatatcatcggcgtgaccaatatcgatggtcagggaattgaaggggttgagaaaagcttcgatcgctggctaaccggtcaaccgggcgaacgtacggtgcgtaaagaccgctatggtcgggtgatcgaagatatctcctctgtggatagtcaggcggcacataatctggcgctgagcgtcgatgaacgcctacaagcgctggtttatcgcgaattgaacaatgcggtggcgttcaacaaagctgaatcaggaaccgcagtgctggtggatgtgaacaccggcgaagtgctggcaatggccaacagcccttcttacaacccgaacaacctaaccggtacgccgaaagaagccatgcgtaaccgggcaattaccgatattttcgagccgggctctacggttaagcctatggtggtgatgaccgcattgcagcacggcgttatcaaagaaaacagcgtattgaatactctgccgtactttgttaacggccatcagatcaaagacgtggcgcgttatgcagagctgtcggtgacagggattctacagaagtcgagtaacgtcggtgtttctaagctggcgttagcgatgccatcctcagcgttagtagatacttactcacgttttgggtttgggaaagcgaccaatttggggttggtcggagaaagcagtggcttatatcctaaaaaacaacggtggtctgacatagagagggccaccttctcttacggctacgggctaatggtaacgccgttacagttagcgcgagtctatgcaacgatcggcagtatgggtatttatcgcccgttgtcgattaccaaagttgacccaccggttgccggtgagcgcgtcttccctgagcccattgttcgcaccgtggttcatatgatggaaagcgtagcgttaccgggcggcgggggcaccaaagctgcgattaaaggctatcgtattgcgattaaaaccggtactgcgaagaaagtcggaccggacggcaaatacgtgaaccgatatcttgcgtataccgccggcgtcgcgccggcaagcaaccctcgatttgctctggttgtggtcattgatgacccgcagggcgggaaatattacggcggtgcggtttctgctccggtatttggcgcaattatgggcggcgttttgcgtaccatgaacgttgaaccggacgcgttaccgaccagtgataaaagcgaattagtaattaataaaaaagagggttcaggtggcagatcgtaatttgcgcgacttactcgctccttgggggcttgacgtcccggggcgtgcgctacgggaaatgacattagacagccgcgtggcggctgccggggatctgtttgtcgccgttgtcggctaccagacggacgggcggcgctatattccgcaggctattgctcagggcgttgccgccgtgattgctgaagccgaaggcgtagcaccagatgccagcattacggaaatgcacggcgttcccgtgatttatctgagcaatctgaatcaacatttatccaaactggcaggccagttttaccaacagccgggcgcggcgttgcgcttaattggcgtcactggcaccaacggtaaaaccaccactacgcagctgttggcgcaatggactcaggcgttgggggagagcagtgcagtgatgggtaccgtgggtaacgggctgctgggacaggttgtgccgacagaaaataccaccggctcagcggttgatgtgcaacagattttgcattctctggttgaacagggcgctaaagtggccgcgatggaggtttcttctcacggactggtgcaaaaccgcgtggcagcgctgccgtttgccgccgccgtgtttaccaacctgagccgcgaccatctggattaccacggcgacatggcgagctatgaagcggctaaatggctgctgttctccactcatcaggccgaacacaaaattatcaatgctgacgatgacgtcgggcaacgctggctgagccagttgcctcaggcggttgccgtcagcatggaagataaagtgccgcagggctggaacggtccttggctgtctgccactcacgtggattatcacgataacggcgctacgatttcttttgactccagttggggtaaaggtcagttggaaagccgcctaatgggcgcatttaacgtcagtaacctgctggtggcgctgtcgaccttgttagcgctgggttatccattggcggagttgttaactgctgcacctaggctccagccggtttgtggtcgtatggaagtgtttaacgctccaggtaaacctacggtagtcgttgattacgctcatacaccggatgcgttggaaaaagctttggcggcggcccgcctgcactgcaaaggtcaactgtggtgcgtattcggctgcggcggcgatcgtgacaaaggtaagcgcccacttatgggagccattgcagaacagctggccgatcgcgttgtcgtgaccgacgataacccgcgtagcgaggagccgcaggctatcgtggctgatattcttcgcggtttgatggatgcgggccgtgcgctggcaattcatggccgcgccgaagcggtaaccagcgcgattatgcaggccaaagaagaagatgtggttttggtggccggtaaaggtcacgaagattaccaactggtaggcaaccgtcgtctggattattccgaccgtattaccgttgcccgtttgctggggggggtcgcatgattcccgtttccctgcaatacctcgcggagcagcttaatgctgagctggtcggtaacgacgatatgattaccgaagtgaccaccgatacgcgtcaggtgacggcaggttgcctgtttgtggcactgaaaggcgagcgttttgacgctcatgattttgctgaagcagccgttgccgcaggtgctggggcgttgttggtaagtcagcgcttattggtggatgttccgcagatcgtggtgaaagacacccgtctggctctggggcagtttgccgcttgggttcgtcagcaagtgcctgccagagtcgtcgcgttgaccggttcttccggtaaaacctcggttaaagagatgaccgcagcgattctgcgtcagtgtggcaacgtgttgtatacctccggtaactttaacaacgatatcggtgtgccgctgacattactgcgtttaacaccagaacatgattttgcggtgattgaactgggtgcgaaccatattggcgaaatcgcctacaccacggatttaagccgcccggaagccgcattggtgaacaatctggctgccgctcatctggaaggctttggttcactggcgggcgttgcgcaggcgaaaggtgaaatctttgccggtttgccagccaaaggtattgccattcttaacgctgacagtcatgactggccgcattggcagtccacgctggctcacaagcaggtttggcgtttttcaccgcaggccggtgaagacactgatttttatgccagcgatgtgcgcattcatcagcaaggtatggatttcactctgcattcgcctttcggcaatgtagccgtgtcgttgccgttaccgggtcgccataacatcgccaatgctttggctgccgcggccctcgcgatgtcggtcggtgcagatgtcgatgcggtgcgtcagggtttatctcagttgcaagcggtaaaagggcgtttattcccgatttcgctggccgaaggaaagctgctgctagatgacacttataacgccaacgtgggttccatgatcgccgcggcgcaggttctggccgatatgcccggttactgcgtaatggtggtgggtgatatggccgaattgggtgaaaccgcagaagattgtcaccgtcaggtgggtgaagctgcccgtctggctggagtggataaagtgttgagcgtggggaaattaagtcagctcatcagtcacgccagcggtaacggcgagcattttcaagataagagcgcgttgacggctcgtttggcggccctgttgtccgaacatcaagttatcaccgtattaattaaaggttcacgtagtgctgccatggaaagtgttgtgcaggcgttacaggagaaagcatcatgttagtgtggctggctgaatatctggtcaaattctattccggttttaacgttttttcctatttgacgtttcgcgccatcgtcagtctgttgaccgctctgtttatctccttgtggatggggccacgcctgattgcttatttgcagaagctgcaaatcggtcaggttgtacgtaacgatggcccggagtcacatttcagcaaacgcggcacgccaaccatgggcgggctgatgattctgttctccattaccatttcggtattaatgtgggcttatccgtctaacccttacgtctggtgcgtactgtttattctggtgggctacggaatcgtcggttttgtcgatgattaccgcaaagtggttcgcaaggataccaagggactgatcgcccgctggaagtacttctggcagtcggtgatcgcgctggccgccgcctttaccatgtacaccatcggtaaagacaccccggcaacgctcttggtggtgccgttctttaaagatgtgatgccccagttggggctgatgtacgttctactggcgtacttcgtgatcgtcgggaccagtaacgccgttaacctgaccgacggtttggacggtttggccattatgccaacggtatttgttgctgcgggcttcgcgttggtggcctgggcgacgggtaacgtcaactttgccaactatttgcacattccttatctgcgtcattccggtgaattggtgatcgtctgtaccgccatcgtcggcgccggattaggtttcttatggttcaacacctatccggcacaggtctttatgggcgatgtcggctcactggcgctgggcggcgcattaggcaccatcgccgtattgctgcgtcaggaattcttgttgctgattatgggcggggtattcgtggtggaaaccctgtcagtgattctacaggttggctcctttaagcttcgtggtcagcggattttccgtatggcaccgattcatcatcattatgagctgaagggttggcctgagccgcgcgtgattgtgcgcttctggattatttcgctgatgctggtcctgattggcctagcgacgctgaaggtgcggtaattatggtggattatcagggtaaaaaagttgtcattattgggctggggctaaccggcctctcctgcgttgatttctttatgacgcggggcgtttcgccgcgcgttatggatacccgcatcaatccaccgggtctggataagcttcctgccggtttggagcgacatttgggcgatctgaatcagcaatggctgttagacgccgatttaatcgttgccagcccaggtatggcgctggctaatccggcgttgagtgaggcggcggaagctggcgttgaaatcgtcggtgatattgaactgttttgccgtgaaaatcaggcgcagatcgttgcgattaccggctctaacggtaaaagcacggtcactacgctggtgggtgagatggcgaaagccgcaggctggcaggttggcgtcggtggcaatatcggcgttccggctctgaccttgctgaagcaggaaaatcagttggtggtgctggaattatccagcttccaactggaaaccacctcaagtctgcacgccaccgccgcgaccgtcttgaacgtgacggaagatcataccgatcgctatccgtttggtttgcaacaatatcgcgccgccaaactgcgtatttatgaaaatgccaaaacctgtgtggtaaacgccgatgatgcgctaaccatgccggtacgcggagccgatagccgctgcattagctttggcgttgatgtgggcgattaccatctgaataaacagcagggcgaagtctggctgcgggttcgcggcgagaaagtgctgaacacccgcgaaatgaagctgacaggccgacataactataccaatgcgttggcggcgctggctttggctgatgtggcggggatccctcgttcatcgagcttaaaagcactgaccacctacgcagggctggcacatcgcttccaattggtgtttgaaaacaacggggtgcgttggattaacgattccaaagccaccaacgttggcagcaccgaagcggcgctggacgggctatacgtcgatggcactctgcatttactgctgggtggcgacggtaaatccgctgatttttccggtctgacccgttttctacagggtgacaaagtccgagtctattgtttcggccgtgacggcgagcagttagcgcagttgagaccggaagtctctcagttgactgaaaccatggaacaggcaatgaaattgctggcacagacgctaaaaagcggcgatatggtgctgttatcacctgcctgcgccagtctggatcagttccgcagttttgaacaacggggcaccgaatttgcccgtctggcggaggaactgggctgatgcgtatgctggggctagggctgtttaataagttaaagcactgggtcatgggatcgcgggagagcgacgccaccagtatggtgctttatgacagaaccttgctgtggctgacctttggtttagccatcatcggttttgtgatggtgacttcggcatcaatgcctatcggtcagcgtttggcgggcgatcctttcctgttcgccaagcgtgacgcgctctacctcggtttggcctttggtttgtcgctggtcacgctacgtattccgatggaaatctggcagcgctacagcaacattatgctgctgctgtccatcgtgatgctgctaattgtattggtagtcggtagctcggttaacggtgcatcccgctggatttccatcggcccgttgcgtattcagccggcggaattatctaaactctcgctgttttgctatctggccagttatctggtgcgcaaggttgaagaagtacggagtaacttctggggcttctgcaaaccgatgggcgtgatggtaatactggcagtgctactgctggctcagccggatttgggcaccgtggtggtactgtttattactacgctggcgatgctgtttttagccggagccaaaatgtggcagttcctggcgattatcggctccgggatttttgcagtttgtctgctaatcattgccgagccttaccgtatgcgccgggttacttcgttttggaacccgtgggaagatccttttggcagcggttatcagctcactcagtctctgatggcgtttggccgcggggagttctgggggcaaggtttaggtaactcggtgcaaaaactcgagtatttgccggaagcacataccgactttattttcgcgattttaggggaggaactcggctatttcggtgtggttttagccctgttaatggtattcttcgtcgcttttcgcgcgatgtccattgggcgtcgtgcgttagagattaatcagcggttttccggctttttggcctgttcaatcggcgtttggtttagtttccaggcgttggttaacgttggggctgcggctgggatgttaccgaccaaaggtctgacactccccctgataagttacggtggttccagtctgttgattatgtcaacagccatagttttactgctgcgtattgattttgaaacgcgtttggcgaaagcccaggcgttcgtaaggagtgcccgatgagtgggaaaaccaagcgtttaatggtgatggcaggcggaaccggtggacatgtgttccccggtttggccgttgcgcatcatctgatggcgcagggctggcaggtgcgttggttaggcaccgccgatcgcatggaagccgatttggtccccaaacacggcattgagatcgattttattcagatttccggtttgcgtggcaaagggctgaaagctcaactgactgctccgttgcgcatctatcgtgccattcgtcaggcgcggaaaatcatgcgtgattaccagccagatgtggtgctgggaatgggcggctatgtttctggccccggcggtctggcggcgtggatgaacggtgttccggtagttttgcatgagcaaaatggtatcgcaggtttaaccaaccgttggctgtcgcgtattgccaaaacagtattgcaggctttccctggcgcatttcctcacgcagcagtggttggcaatccggttcgtacagacgtattggcattgccgctgccggctgaacgtttagccggtcgtgaaggggcgacgcgtgtgctggtgatcggggggagtcagggtgcgcgcgtgctgaatcaaaccatgccgcaggtggcggcggatctgggcgataaaatcaccttatggcatcaggtgggtaaaggtgcgttggctgaagtcgagcaggcttaccaacaggccggacagacgcagcacaaaatcgtcgagtttatcgatgatatggctgcggcctatagctgggctgacgtggtggtgtgccgttcaggcgcgttgacggtcagcgaagtggctgccgccggtttacccgcgatttttgtgcctttccaacataaagatcgtcagcagtactggaatgcgttgccgctggaaaaagccggtgccgccaaaattatcgagcagccgcagtttactgcttccgcggtgagcagcctgctacagcagtgggatcgaccgacgctgttagcaatggcggaacaggcacgagccgttgccattccggatgcgaccgagcgcgtggccgcggaagtgatcgctgctgcgaagccttgattcaaggcggaaataatgaacagttggcgtttaacgcgggctgtagagatgtaacaaactacatagtgaagaaaaacgtgaatacacaacaactggcgaaactacgtactatcgtgcccgagatgcgacgcgtccggcacattcactttgtcggcatcggtggtgctggcatgggtggtatcgctgaagtgttggcaaacgaaggctatcagattagcggttctgacctggcgccaaacccggtcactcagcagttaagcgcattgggcgcgcagatttatttccatcaccgtccggaaaatgtccgtgatgcgagcgtggtggtggtttcaacggcgatttctgcggataacccagaaatcgtggccgcgcgggaagcgcgtattccagtcattcgtcgcgctgaaatgctggcggaactgatgcgttatcgccacggcattgcggtagccggtactcacggtaaaaccaccacgacggcgatggtttccagcatttacgctgaggcggggttggatccaaccttcgtcaacggcggtttggtaaaagcggcaggcgttcacgcgcgtttgggctccagccgttacctgattgcagaagcggatgaaagcgatgcttccttcctgcatttgcagccgatggtggcgattgtgaccaatatcgaagccgaccatatggatacctatcagggtgactttgagaatttaaaacagacatttattaacttcctgcacaacctgccgttctatggtcgcgcagtgatgtgtgtggacgatcctgtggtgcgtgagttgctgccgcgcgttggtcgtcacattaccacttacggtttcagcgatgatgctgacgtacagattgccagctatcagcaaattggcccgcagggtcactttaccctgcgtcgtcaggataaacctttgctgacggtgaccctgaatgcgccgggtcgtcataacgcactgaacgccgccgccgcggttgcggtagcaacggaagaaggcattgacgacgaagcaattttacgtgcgctgagcggtttccagggcaccgggcgtcgtttcgatttcctcggtcatttcccgctggaaaatgtgaacggtaaaagcggtagcgtgatgctggtggacgattacggccatcacccaacggaagtggatgccactattaaagcggctcgtgcgggttggccggacaaacgtatcgtgatggttttccagccgcatcgttatacccgtactcgtgatttgtacgacgactttgccaacgtgttggaaggtgtggacgtgttgctgatgctggatgtgtattccgctggcgaaacgccaattcctggtgccgacagccgttctctgtgccgcaccattcgtaatcgcggccagttggatccaattttagtaacggatagcgacgcagttccgtcagtattagctaaagtattgaatgacaacgatctgatcctggttcaaggagcaggcaatatcggtaaaatcgcgcgcaatctggcagagaccaaattgcagcctcaggtgaaagaggaggaacatcatggttgataaagtcgccgtactgctgggtggaacctccgctgaacgcgaagtgtcattgatgtccggcgcggcggtattagccggtctgctggaaggcggtgttgatgcccatcccattgatactattgattttcctgtggctcagctcaaagagcatggcttcgataaagtctttatcgctctgcatggccgcggcggtgaagacggtacgctgcaagggctattggagtttctgcaactgccttataccggcagcggcgtcatggcctctgcgctgacgatggacaaattacgcagcaaattagtgtggcaggctttgggtttacgggtttcaccttttgtggcgctctctcgtcaacaatttgaaacactttcatctgatgacttcgctgagcggatcgctaagcttggcctgcctttaatcgtcaagccaagccgcgaaggctctagcgttggcatgagtaaggtggatcgcattgagaatctgccggtagcgttggaagaagcgttccgtcacgacaatgatgtactgattgaaaaatggctcagtggcccggaattcaccgtggcaatgttgggtgacgaagtgttgccttcgatccgcatccagcccgccggtgtgttttatgactatgaagccaagtatttatccgatgatacagaatacttttgcccaagcggtttaaacgcggaacaagagcaacagctggccgaactggctcgtcaggcctatcaggctctgggttgcagcggctggggtcgggtggatgttatgcaggatggcgatggcaaattctatctgttagaggtgaatacctctccgggtatgaccagccatagcctggtaccgatggccgcacgtcaggccgggatgagtttctcccagctggttacgcgcattctggcgctggctgactgatatgtcgcaagctgctctgaatgcacgggaacgtgccgccgaaacccgcgctgctcgccggagcaacggaggccagttagcggggttggttttcctgctgatggtgctgggaaccgtgctatggagcggctgggccgttgtaggttggatgaaggatgccagccgtttgccactgtcaaaactggtggtgaccggcgaacgccattacaccaccaatgacgatattcgccaggcgattctggctttgggcgcaccgggaacctttatgacgcaggatgttaacatcatccagcagcagattgaacggttaccctggattcagcaggctagcgtgcgtaagcagtggccggatgagctgaaaatccatttggtggagtatgtgccggttgcccgctggaacgatttacacatgattgatgccgcgggtaagtcgtttagcgtgccttcggaacgcatcggcggccagaaattgccgctgctgtatgggcctgaaggcagtgaacaggatgttctggagggctaccgggcgatgagtaaggtgttagcggccaataaatacacgctaaaaatggcggcaatgagtgctcgtcattcttggcaactggccttagataacgatgttcggctggagctggggcgggatgatcgcatgggacgtttgcagcgctttatggagctgtaccccatgctagagcagcagccagataaacgggttagctatatcgacctccgttatgacaccggcgctgcggtgggttggtccccggtatttatcgaccagcaggctagcagccagcagaacagtaatccgcaacagaatcaggcacaggcaaaacaacaatgatcaagtcgacggacagaaaactggtagtgggtctcgagatcggtacggcaaaggtctccgcattggtaggggaagttctgcccgatggcatggtcaacattattggggttggcagttgcccatcccgtggtatggataagggtggcgttaacgatcttgaatcggtagtgaaatgcgtccaacgtgcgatcgatcaagcagagttaatggcagattgccagatttcctccgtttatctggcattatcgggtaaacatataagctgtcagaatgaaatcgggatggttcctatttcagaagaggaagtaactcaggaagatgtagagaacgtagtgcataccgcgaagtcggtacgtgtgcgtgatgaacatcgaatcctgcacgttatccctcaggaatatgccattgattatcaggaaggtattaaaaatccggttggcctttccggtgtgcggatgcaggccaaagtacacctgattacctgccataacgatatggcgaagaatattgtcaaagcggttgaacgctgcggtctaaaagttgaccagcttatttttgccggtctggccgccagttatgcggtattgaccgaagacgaacgcgaactgggcgtttgtgtggtagatatcggcggcggtaccatggatatggcggtgtacaccggtggtgcactgcgtcacaccaaggtgattccttacgctggtaacgtagtcactagcgatattgcctacgcctttggcactccgccgaccgatgcggaagcgattaaagttcgacacggctgtgcgctcgggtcgattgtcagcaaggacgaaagtgtagaagtgccaagtgttggcggacgtcctccccgtagtctgcaaagacagacactggccgaggtcattgaaccacgctatacggaattgctgaacctggttaatgacgagattttacagttgcaggaacaattacgtcagcaaggcgtaaaacaccacttggcagcaggtattgtgcttacaggtggtgcggcacaaattgatggcctggccgcatgtgcgcaacgggtgtttcatgcccaggtacgtattggccaaccgctcaatattaccgggctgacggattatgcgcaggaaccttactactccactgctgttgggttattgcactacggtaaagaatctcatctcagtggtgagtcagaagtagaaaaacgtgcctcggtgggcaattggttcaaacgtatcaatagctggctgagaaaagagttttaatgtttcaacaaagagatcatgctgaacatattttttgatctcgaagcgacaggcacaaaacggagagaaactatgtttgaacctatggaactgaccaatgacgcggtgattaaagtcatcggcgtcggcggtggcggtggcaacgccgttgaacacatggtgcgtgagcgcatcgaaggtgttgaattcttcgccgttaatacagacgctcaggcgctacgtaaaacggcagttggccagactatccagatcggtagcggtattaccaaaggtctgggtgctggtgcgaacccggaagtgggtcgtaattctgcggaagaagatcgcgaagcgctgcgtgcagcactggatggcgcggatatggtcttcatcgcggcaggtatgggtggcggtaccggtactggtgctgcgcctgtagttgcggaagtagcaaaagaactgggtattctgacagtggccgtggttaccaagcctttcaactttgaaggcaagaaacgcatggcgttcgctgagcagggtatcgctgagttgtctaaacacgttgattcattgatcactattccgaacgacaagttgttaaaagttctgggtcgcggcatctctttactggatgcattcggcgcagctaacgacgtgttgaaaggtgccgttcagggtatcgccgaactgatcacccgtcctggcctgatgaacgtcgactttgctgacgtgcgcaccgtgatgtccgaaatgggttatgccatgatgggttccggcgtcgcttgtggtgaagatcgtgcggaggaagcggcagaaatggcgatttccagcccgttgctggaagatatcgacttatctggtgcccgtggcgttctggtcaacatcaccgctggtttcgacctgcgtttggatgagtttgaaaccgtaggtaacaccattcgtgccttcgcgtctgataatgctaccgtggttatcggtacctcattagacccggaaatgaacgacgagctgcgtgttactgtggttgcgactggtatcggcatggacaaacgtccggaaatcacgctggttaccaacaagcaaactcagccagtgatggatcaccgttatcagcagcacggtatgtcaccgttaccgcaggaagtgaagcctgcggcgaaagtggtgaacgaccaaactgctcaaacgaacaaagagccggattatttggatattccagcgttcttgcgcaagcaagctgattaatttccaaaaatttggtatctccgctctttgtgctaaactgtcccaccgatcttcctatatgctagatcggtaggatggataacattgcgagataaaacgatgatcaaacaaaggacattaaaacgtattgttcaagcgactggtgttggtttacataccggcaagaaagtcacgttgacaatgcgccccgcgccggccaataccggggtcatctatcgtcgcactgacttgaatccaccggttgatttcccggcagatgcaaaatccgtgcgtgataccatgctctgtacttgtctggtcaacgagcatgacgtgcgtatttctaccgttgaacatctcaacgctgctttggcggggttagggattgataacattattatagaagtaaatgcacctgaagtgccgatcatggacggcagtgccagtccattcgtgtacctgctgctggacgccggaattgaagagctgaattcagcgaagaaattcctgcgcctgaaagataccgttcgggttgaagacggtgataaatgggctgaactgtctccattcaatggattccgtttagatttcaccattgatttcaatcacccggcgatagataccagtacgcagcgttaccgcctggatttctctgctgattcatttgtgcagcaaatcagtcgtgcgcgtacttttggctttatgcgtgatatcgaatatctgcagtcccgcggtttgtgcctgggcggtagtttcgattgtgccatcgtggtagatgattaccgcgttctgaatgaagatggcctgcgcttcgaagatgagtttgttcgtcacaaaatgctggacgctatcggcgacctgttcatgtgcggccacaatattattggcgcgttcaccgcgtataaatctggtcacgcactgaataacaagttactgcaagccgtattggcaaaacaggaagcttgggaatatgtgacgttccaggacgaagccgaaatgccattggcattcaaagctccgtctacggtattggcttactaaagctacttatcacgtttggttgcgttggcactctctccggccaacgcagccagtcgttccaaaatagtcctcaatttctctgggctacggctcgccaatcctcgtaattcctttgcactttccaaactcaagtgacgtaatggcgctgactcttcgcttttttgcgcggcctgagcggtttcttgtattttgttctgccctttcgccattaacgcaggattaatcctgatgtcgattgaagacaatgatggtagaatttgcgctcgtagtgcagaaagcaggttagattgttcgtaacgtaaccgcattagccaactggcgttggcggtttctagcaccaaaatactctgtcgataattggccacacggcaccaaggctgcaactgtgacggaagcaatgcttttaccgcacgattgagctttaacagtgcgactgcgcgctgctgtacattgtgcagtgggcctttctccgttgcggtcgcatcgtcgaacagaacatctaataattgtgggcggctttcacgcattgacagggctccggcggattttaaacttgtgatcggtattctaaatcgttggcgacaatttggcagacgttatttctggccgcatctcctattggggatggtcgcggcgagtcttggcgtgccgtcaaacttgtccagcgggccagatcaaaccgcactgccgagtacatcttccagccaaagccgccaaaatcacggtgcgaccaactttaatagtctagctctgctgcaagagacgcatcgccgtccttccttcagcgtagactattggcagcagcatgcgcttcgcaccgtcattcgtcacctttcttttgctcttgcaccgcaggtcgcctatagccgcgtgcaggaagccgagacgctagaacaggtagagccgacgcaaattcaacagcttgcgctactggatacgcttaatgcgttgctaacccacgagtcgcggcctccgaccatcattcgctataccaaacgagcgcctcagcccgttttatcccttcatcaacccggcttatggcttgcgcaggtacaaggcattcgtgccggaccggttcgttacagctagttattcctctgaagtcttttaacttaatgtaacctttgaccgccggtttggtggtcttgtaagagatataaagaattatgctaatcaaattactcactaaagtttttggcagccgtaacgatcgaaccctgcgtcgtatgcgcaaagtggttgatgtgatcaaccgtatggaaccggacatggaaaaactgtccgatgaagaattaagagccaaaacggatgagttccgcgcacgattggcgaaaggcgaagtgttggaaaacctgattccagaagcttttgctgtggttcgcgaagccagtaaacgcgtattcggcatgcgtcacttcgatgtgcagctgttgggcggtatggttctgaacgagcgttgtattgcagaaatgcgtaccggcgaaggtaaaactttaaccgcaacgctgccagcttacctgaatgctctgactggccgcggcgtacacgtggttaccgtcaacgattatctggctcagcgcgatgcggaaaataaccgtccactgttcgaattcctcggcttaactatcggtattaacctgccgggtatgacagctccagcgaagcgtgaagcctatgccgctgatattacttacggtactaacaacgaatacggttttgactacctgcgcgacaacatggcgttcagcccggaagagcgtgtgcagcgcaaactgcactatgcgttggtggatgaggttgactccatcctgatcgatgaagcgcgtactccgttgattatttctggccctgcggaagacagttccgaaatgtatattcgggttaacaaactgattcctaaactgatccgtcaggaaaaagaagattccgataccttccagggtgaaggccacttctcggtagatgaaaagtcccgtcaggtgcatttaactgaacgtggcttgatcatgatcgagcagatgttagtggaagccggcattatggacgaaggtgaatctctgtactcaccggccaatattatgctgatgcaccacgtaaccgccgcgctgcgtgcccacgtactctttacccgcgacgttgactacatcgttaaagatggcgaagtcatcatcgttgatgaacacactggtcgaaccatgcaaggccgccgctggtctgacggcctgcatcaggccgttgaagccaaagaaggggtggaaatccagaacgaaaaccaaacgctggcttccattactttccagaactatttccgtatctacgaaaaactggccggtatgaccggtactgcggataccgaagcctttgaattcagctctatctataagctggataccattgtggttccaaccaaccgcccaatgatacgtaaagatctgccggatctggtctatatgactgaaatggaaaagattggcgccatcattgaggatatccgcgagcgtactgctaacggccagccagtgctggttggtacgatttccatcgagaaatccgaagtggtctctgctgaactgaccaaagccggcatcgaacataaagttctgaacgctaaattccacgccatggaagccgaaattgtgtctcaggcgggtcagccgggtgcggttaccatcgcgaccaacatggccggccgtggtaccgatattgtgttaggcggaagctggcagagtgaaatcgcacagttggaaaatccgactgaggagcaaattgccgaaattaaagccgcatggaaaattcgtcacgatgcggttctggcatccggcggtttacacatcatcggtactgaacgtcacgaatcccgtcgtattgataaccagctgcgcggtcgtgcgggtcgtcagggtgatgccggttcttcacgcttctacctgtcaatggaagatgcgttgatgcgtatttttgcctctgaccgtgtgtcaggcatgatgcgtaaactgggtatgaaaccgggcgaagccattgagcatccttgggtaaccaaagcgattgctaacgcacagcgtaaagtcgaaagtcgtaacttcgatattcgtaaacagctgctggaatacgatgatgtagccaacgatcagcgccgtgcaatctacagccagcgtaacgagttgctggacgtgtctgacgttagcgaaactatcaacagtattcgtgaagatgtgttcaaagttacgctggatagctacattccgccgcaatctttggaagaaatgtgggatgttgaggggctggaacagcgtctgaaaaacgacttcgatctggatatgccgattgcgcaatggctggaagatgaaccacagctgcatgaagaaaccctacgtgagcgtattcttcagcaggcaattgacgtttacaaacgcaaagaggaagttgtcggcgttgaaatgatgcgcagcttcgaaaaaggcgtgatgctgcaaacgctggattccctgtggaaagagcatctggcagcgatggattatctgcgtcagggtatccatttacgtggctatgcgcagaaagatcctaagcaggaatataagcgcgaatctttcgctatgtttgctgcgatgctggaatctctgaaatatgaagtgatcagcgtgctgagtaaagttcaggtacgtatgccggaagaggtcgaagcgctggaagttcaacgccgtgaagaagctgagcgtttggccagacagcaacagctgagccatgaaaatgacaatagcgccctgatgtctgaggaagaggtgaaagttgcagccagccttgaacgtaaagtgggccgtaacgatccttgcccttgtggttcaggtaagaaatataagcaatgtcatggccgtttgcagaaataaagctgcgattagccagcaatagttaaaacagtaaatagcggggcggccaaatagaccgcccttctttttgcttaatatcgcggaatcaggatgtgaacgtgagataaacgaggaatatcagaatgaaacatttgcagatcgccgtgggtatcatccgtaatgcgcaacgcgagatttttattacccagcgcgcggcagattcccatatggcgggtttctgggagtttcccggagggaaaatagaacagggtgaaacctcggaaatagctttgtatcgtgagctattggaagaggtcggtattgttgcgcaaaatgcggtgcagataaccactctggaacatcgttttcctgaccgaattgtcactctcagtttctatctggtagaacaatggcagggcgaaccttttggtcgggagggccagccggtgcgctgggttaagcaagaggagttacgggctgaggaattcccaaaggctaatctatcgatagttgagttactggtttctcaggcataatcacactcagattggagcacacaatgcgtggctccaatctgtgagcgcattagcgcggatcttcctcactccattcatcgctatctgagagttctccctgacttggaatacgcttctcttcatcggcccactcgccaaggtcgatcaactgacagcgtttgcagcaaaaaggacgatacgggctttgctcgccccaaataacgattttcccgcaggttgggcaattaacctgtatttcagttgaatccatattctctcctaaaacttgcttactgtatgacaacacagccataagcatcaataagtgcaaaagttaacaacaggccaactcaaagtttaagcgtgcgggtacagtgccattctcgctatccagcggtaggaaacgtatcgcgtagcgggttttgtggccggaaacctgcggataaagctgatgttccatggaaattcgcagtcgcaataaatcagcgccgtcggcattatcctggaagaatccatttaggctgatttggttgcgcaacgggccagactggcgaattaaatccagaatcatggttaatgattgattcagcggaattaacgtaccaagtaattcattggtatgctgattgcgttgttcctgcggcagatgcagccaaatatgtagcgtaggcagatcgaaactacaacaaccgcctggaatactgagccgttggcgaaccagactaatcatgcgatcttctttcagcgactgtccgatacgcggtgcggacatcagcactgatgcccggcttttcagctgagcgcgtaattcatcaatcaacgccatatcgacaccgggaacatcagcccaggcctgaagtttttgctgctgacgctcaagttctttgagtaaatcagtgcgaacttcccccctttcaagcacatcgatcagatcggatgcggtgcgaaaaaacgttaaggcgctggcgatattatccagatttcgctgactttctaactgttgcagcaaaaactcaatacgaagccaggtgcgcattttttcattcagcgggtgttcaaaaagtacagttgaggtgagatcactcatcggtgtaaatcctgttgggtcaccgtcgccaaccttaaataccggtgatgaagcgaggcaacgagcggtgggatcgtggaaggatcgccgctattgtcgataatgtcatccgcacaggccagacgctgttgccgcgtggcctgcgaagctaaaatatgttctgcctgctgacggctgataccgtctcttgccatggtgcgtctaagctgaatctcaggggtgacatccacgaccaatactcggttagctctatggctcaggttattctcaaccagtaaggggacaacccaaagtacataagccgcttttgcagctgcgagctgacgctgagtttcttgctgaatcagtggatgcaacagcgcattgagccagtttttttccatcgggtcgctaaaaatcttttcccgcagcttggctctattcaggctgccgtctgccagcaggatagaatatccataacgggctttaatctcatttaacgccggcattccaggctcaacaatctgtcgggcaatgatatccgcatcaaccagcggtacgccgagatcggcaaaagcattagcaacggtacttttcccactaccaattccgcctgtaagagcaacaatataggtcattacattgccttgcatactgccgttgaatacccgaattgtaactgaaagctgtgtgtaagacatagcgcggatgcattcggattttgaatctgtctttaatgcctattctctggccgagggagtattttttatatcaatattgctgatagttacgctgctcggaatagtgtaaccagacgaaccagtcaggaagggaaaatgcatggttttcaggtaatttgtgggagtgtagcctaaataaagttaaattcgcagtcttgccgaagaattattcctgcgtatgatagcttcactggaaatggcgtctattacgcccgatctcatcatgcgatccatcgccaataaccaggaaaccaaagccatgcgtattgaagaaggtttgaaattaggttttaaagatgtcttgattcgacctaaacgctccacgctgaaaagtcgctccgcagttgagttagagcgtcagtttaccttcaaacattcaggctataagtgggctggtgtacccattattgcagcgaatatggataccgtcggcaccttccgcatggctgaggttctctcctcatttgatgttcttaccgcagtacataaacactattccgttgaacaatgggccgattttgttcgacgtgtgcctgaatcggtactgcgccacgtcatggtttctaccggtacatctcaggcagattttgccaaaatgaagcaaattctggcgctttctcctgcgctgaaatttatctgtattgatgtagccaatggttactctgagcactttgttgctttcctgcaacaggctcgcgaagcttgccctgacaaagtgatttgcgcaggtaatgtagtcacaggcgaaatggttgaagaactgattctgtctggcgccgatattgtaaaagtagggattggcccaggttcggtttgtacaacccgagtgaaaactggcgtgggttatccgcagctttctgccgtgatcgaatgtgctgatgctgctcacggtttaggtgggcaaatcgtgagtgacggtggttgttccgttcctggcgacgttgccaaagcgttcggtggcggcgcagactttgttatgttgggcggtatgttagccggtcacgacgaatgcgaaggtaaagtggttgaagaaaacggtgagaaattcatgctgttctacggtatgagctctgagtcagcgatgaaacgtcacgttggcggcgtagcagaatatcgtgccgccgaaggtaaaaccgtgaagctgccattgcgtggctcagtggataataccgttcgcgatatcatgggcgggctgcgctctgcttgtacttatgtcggtgcttctcatttgaaagagctgaccaaacgcaccacctttatccgcgttgctgagcaagaaaaccgcgtatttggcagtaactgagctaaataaacttaatcggtttacgctgaacgagtgttttatatcgctgatagtgtgtgattaattgattattaaagaagggacgcaaaatgatgcgtccttttttaatctactgccaaacccaaacccaaacccaaacccaaacccaaacccaaacccaaacccaaacccaaacccaaacccaaacccaaacccaaacccaaacccaaacccaaacccaaacccaaacccaaacccaaacctggaacttttgttaactaataattcccccaagttggaaaatggggaggtacatagcaataaccagtgtgccaatcactgcgccgacgaacagcatcaacattggctcaagcatttgtgtcaacttatcagccagttcctcagtttgctgctgttgccaaccagcaagctttgtcagcacgttatccagtgagccagattcttccccaatgcgtactaactgttggcaaagtggagggaaaagaggttggtgtgaaagggcatcactcagaggtattccttgattaattagctgataaaaatgattgataatggatttgtaatgcagattatcaatggaagtagcggctgcttccagcccattagctaaggttaaacctgctttctgtgtgacagataaagtgcgaaaaatttggctgagacagtaccctttaaccagtggtgctatcagcgggagatgtaacagcaagaattgctctcgttgtttccaccgtgcgcttacccttattttagagatgtaaaccaatacaataccaatgattgccacgatagagtaaataccgtaattacccagtattccggatagatatagcagcccttgagtcagagcgggcagtggggcgtcaaaagtctgatagagccgcccgaattctggtaaaacaacaagtaacatcagggcactgacggcgaaagcaaccagacaaacaaaggcggggtatctgagtgtcttagccacttttttttgcaggtactggcgtttttcctgttgctcggctagctggagacagcatttatctatctcacctgttagttcgcctatggcaattaattgcgcgtatatggctgggaaaacggatggataggcgtttatagcctcagatagcgcctgcccttgagacaggctttcacttacatctcttagtaaacagcgccatattggcgtctcggcctctgctgccaacaattgcagactatttattaacggcagtccggcttgcagaagcgtagctaattggcgtgtgaaattaagcagatgcttcccttgatgtagccgagagcttaggcgttttatcattctgatacggataggctgcagcccctgctgtattactctttggtaaatcaccgatttttcgctagctagagactcgccgacgatcacctttccttcgctatctatgccttgccagataaataaaccgagtgtcattgcattccccttaatggcgtcagatttccgacaactcgtgagatttcggcgatactggttattccctgtttaaccaacgctaagcctgcgatgagtagtgaatggggctcagggggcggctgagaatttttcaggccaggaacaggggctgcactcattaaatcctgctgatttgacggtgtcattgcccatgtgtcatagatacctattcggccatagtaaccgctactacaatgttcgcaaccagtggcataccagtgatgtaaaggctttgggcacaaaattgtgggcagaatgactggctcgggtgctgcgcgtttacaacgttgacatagacggcgtaccaggcgttgggctatcaccagttttaggcaagatgcgagcagataatgactgattcccatttgagttaatcgggctagcgtttcatgcgttgaattggtgtgcaaggtcgaaagcactaaatggcctgttagtgcagcccttaccgcaatatcggcggtttcattatctctgatctcgccgatcataatgacatccgggtcctgcctgagtaatgcacgtaacgcctgagaaaagtctaaatctattttactgttggtctgggtttgattaatgccttcaacgggaatttcgatcggatcttcgacactgcataaattacggtactgctgatttaggtgttgtagacagctatacaaggtcactgtttttccgcttccggttggcccggtaaccaaaatcaatccttgcggtaaacttaaggcctcaaggattgattcccgactttttgggggaagatccagctcgtccaatcgttgcggtatattggtattcagaatgcgtagtaccactttttcgccgtattgagttggtaatgtggcaatgcgcagtgagtagtaatgattatcaaggctaaggctaaactgtccatcttgaggtaagcgccgttccgcactattcagcttagccattactttgagacaggcattgattctattaaccaaattagccggtggggatagcgtttggtgcaaaatgccatcaatacgtaaccgaatacggtaatagcggcgataaggctcgaagtgaacatcagacgcacgtttttgaatcgccatgcgtagcgtttgatgaatgatgttgataatgggcgcatcactttcatcattaagtgaagtcacttccttattatcaaaagcttgagtacgtgatttgtccgtatcagggaggtattttatggccgcttcttccgcgtgttttttactctcgatatctggcttaatcgagccgtttaactgctggattaaatcaggactcaaatgatgaaggtggtgctcaatttttgccgcaggccatagagtcacttccacatttaaaccgcaggcaaagcgtaatgcatttatctcctcactggttgggtactgcaacatggcaagagttaatgtatttgggctgatttccaacggtatcgctcgatactgctggcaaagccgggataacgcatccccggctcctttgttattgattgagcggttgctattcatcgtcgctagacgtctctttaagagcaaataccgacttgcagagtttacttagttcgtcatgatttcctgtacatgcgcgtgtccaggcaaggttaccggcggcgcttttagttggggttaatacaacgcttaatccatccagagtctcctgcccggtcatagagatgaccccttttgcaatgttaatggctttgacataacgagtaggttggccagagggaataccctgactaccagcattgcagcctaataatgccgagtgttccatcgagcaaacctctacggccatgcggtaaggagcactggtttgcaacatatcggttagggccgctttctgtatatagctttgataagcaggaataccgatgccgccgagaatggcaatgatgacgatagaaaccatgagttcaatgagggtaaaaccctgtgagtaatacattttcacactccttgtgatgaaagacgaggtaagggtgcggttttttttatcgcagggaaagtgggtttgaataggactgcgaaacggattgtgagaattttttagtgttgcagtaatcagcggttttttttcggcagaggccgcaaaaaagagctcattgttacctgagctcttttcctggctgaaacaaatctgttagcgttattgaaaacgcatcgagaggtctaaggcggtaacgtgtttagtcagtgcgccgacagaaataaaatcgattcctgtttcggcatagctacgaagtgtctcgagtgtgacattacctgagacctccaactgagcgcgacctgcgttgagggatacggcatcacgcatcataggaatggtgaagttatcaagcatcacgatatcggctccggcatccagagcctgctttaattcatctaaagattccacttcgacttcaattgggacatcggggtggatccaaaatgctttactcacggcttctttaatcgaaccggcggcaataatgtggttttctttaattaaaaaggcatcagtcaacccaagacgatgattgctgccacctccgcataacactgcgtattttaatgcggttcgtaagccaggtagtgttttacgagtatccaggagttgggtatgcaacccttggagtaaagcaacatagcggctgacttcggtggctacgccggatagcgtctgtacaaaatttaatgcggtacgttcgccagtgagcaagatgcgagcagggccggaaaggtggcacaacgtttggttggcggtgagcgcgtcaccgtctgccaccagccactcgacttcaactttaccgccgagctggataaagacttcgttcagccagcgttgcccgcagaaaacgccggcttcgcgagtgataatagtcgcggaggcttgtttatctgcggggagcagttgggccgtcaggtcgcgatcggcattgacctcaccgcctagatcttcactcagtgccaaggcaactgaaaagggaatatcgctttgaattcgctctaataacgcggtgcggcgactgtcggcactgtagctacgtgtcggcatagaaaactccgaaatggcggatagataatagttcaaacatgctactctgttgctggcgtcagtgctactacagagccgttttagaatgagggttgaggtgacaaatgcagttagagaatggctggattgttggggttaagcgggtggtttctcctcattttgatctcagacctgaagatgaggctccctctcttttggtcattcataatatcagtttgccgccgggtgaatttggtggaccttatatcgaccatctgtttaccggaactttgaatgcggatgaacatccttattttgctgatattgtgcacttgcgagtatcggcgcattgcctgattcgtcgcgatggtgaaattatccaatacgtgccttttgataagcgagcctggcatgccggtgtatctcaatttgacgggcgtgagcggtgtaacgatttttccattggtatcgagttggagggaacggatgtgctaccgtttaccgatgcgcaatatcaaagtctgaaaaaaatcagtgcgttgttgctatcccattatcccattaccctagagcggataaccgggcatagtgatatagctcccggccgaaaaaccgatccggggccagcatttgactgggcgctttatcgacaaagtttgactccattattggagtgattttgcagcaatagaggtcatgatagcggaggcgaggattccgtcatttttaccttttttgtgataaccgctgccgggaggcatggtgcctgaaggttcgggctggtggaatgtagagggagacagggaatcaatgacgctttttacgctattgctggtactggcctgggaacgtttgttcaaattaggcgaacattggcagctggaccaccggttggacactatttttagtcggttgcatcgatactcgttgctgcaaacgctcggtctggccattttgtgtatggccattgtcggtttgatgttgcagttggttcaggactatctgttcggcttgccgcggctgttactgtggattgttatctgcctgttgtgcatcggcgctggtggtataagaaaacactatcgtgcttatctgaaggccgctcgacaaggggatgccaatgccagtctgcaaatggcggaagagctggcattaatccatggattgcctgcggactgtggcgaaaaggaccgactacaagagttacagaatgcgttgttatggattaatttccgctactatctggctcccttgttctggctggtggtttgtggtttttatggcccggtagctattacgggctacgcgatgttacgcggataccaaacctggctggcgcgtcaccgaaaccctttgcagcgctctcagtcaggcattgaccgtgttttacactggattgactgggttcccgtccggttggttggcgtggcatacgcactgcttggtcacggcgagcgtgctttgccagcgtggtttgcctctttgggggacttgcattccccgcagtatcaggtgctcacccgtttagctcagtattctctggctagagaaccgcatcttgacccagtacaaacgccacgcgcggcggtatctttggcgcggaaagtcacgttgacgattataattgtcgtagctttgctcacgatctatggtgcactggtatagcgggcattagaggcattctcgataaaaatgactgctatctgacaaggtagctttgtaaataaaacatcggattggcagcaagagcccatcaaaataagtgtatgtcggcttcgttggttttgtaacaggaaacaatgaaatactgagaattcaacgagtttattacggagtttagagtgtattagcgctagctttcagttattaatggggagtattaagtgaacaaggcaagcgaaatacaggcagggaattgtcggattgaggcggttgagcctgatggttttttgctcctgatttcccctacacattagttcgctttcggcttgggtaataccagacactcatggccgtggaatgggtaaagatgtcaccgcagcgggagttttaagctcctttataatacggtgatttccgcggtaattggctgattttctctggtgttgcgagagaggttaggcgtaatttctcatgtgaaaacaatcgttaatcgttaatcgttaatcgttaatcgttaatcgttaatcgctaatcgctaatcgctaatcgctaatcgctaatcactaatcactaatcactaatcactaagcaaatgactttcgatgaagctcagtaagcggctttattgctctatgagcaattaaaaaacaggcccacagtatgaatgcgggcctgaaggttggtgcttatcgctataaatcagatgccgcaaagcgacgagcgattaagatttattctgcttaactcggtttttcagcatataaccaaccgctagcacgacgacccagacggggataagcaagacggaaatctgaatgcccggtgtcaggtacatgataaccaaaatgcccgccaggaaagtgaggcataggtagttgctgaagggataccagaaggctttaaacttaggctcaattccttggcggtttttcgctgcacggaattttaagtgagcaaggctaatcattgcccagttgatcaccagcgctgaaaccactaacgccatcagtaattcaaatgcccgtccgggaatcagatagttaatcaatacgcagaatgcagtcgcaaaggctgaaacagcaatagcaatgaccggtacgccgcgaccatctacttttaataaagcttttggaccgttcccttgcttggctagaccaaacagcatgcggctgttgcagtaaacgcagctgttgtacaccgacaacgcggcggtaagcactacgatattcagcacagtagcgacaatattactgtccaaagcatggaaaattagtacgaagggactgccgccctcaaccacttttccccaaggataaagtgagagcaatactgcaagtgaaccgatataaaacagtaagatacgatagataacctgattggttgccttagggatgctgcgcgcgggatcttctgcttctgccgcagtgatgccgaccagttcaaggccgccgaaggagaacataatcaccgccatcgccatgactaacccaatgaaaccattagggaagaagccaccctgagcccacaggttggtgaccgtcgcttctgggccaccctgtccgctcaacaacaaatagccaccgaatacaatcatcccgatgatagctaccactttaatgatggcaaaccagaattccatttcgccatacactttaacgttagccaaattgatagcgttgatagcgaggaagaatactgcggcggaaacccaggtcgggatttccggccaccagtattggacgtaaatccccacggcggtcagttcggccatcgcgaccaaaacgtaaagtacccaataattccagccagaggcgaaaccggcgaagttgccccaatatttataggcaaaatggctaaatgaacctgcgaccggttcttcaacgaccatttcacccagttggcgcatgatcagaaaagcgataaagccgccgatggcgtatcccagcagcactgaagggcctgccatttttatggtttgtgcaataccgagaaaaagccctgtgccaattgcgccgcccaaggcgattagctggatatggcggttttttagaccccgctttagctccgcgccttcttgttgaacactcatcgttgcatcctctgtctttgtggctaatgcctaaatcgctatttgtggtgttgtgtaatcttgaaatgccgttgtctgtattgttttatttacgggtgttcattttgataatggtgccaatgactacccattacgtgagaatagtggtatgcgagaattattgcatctgctttttcaatggatcactcgtattttatgcatttaagaaatgctaaggccggtgactattcagggggcttcagaaatggcgagggagaaacggcggttttatagacattcttcggtgaaatgagaatttataaaatggtcaaaccagttttcaggggctcatattctcggtaataaaataaagagtgttatcggcgaatttaaattcatttttattgatttaataatcacaaatgcctcaactataacgcttcagcttgcctaattatccttttcataatcgttacaatttttcgggggtgagtaatggtattaccacctataggttaccactttgcggcataacattagtgaagttgttaaaatgtgctggctttcatgatttcggtcaatgtccgtatggacagctagtgaatactttgttactttatcgtcacgtttttgaaattggtattaccaattgactcagcgccattcgcagagacgaattcactcaatacggcttacagcgcgactcacataaattatggcctacaacaaaatacgccaacccaaattatcagatgttatcgagcagcagcttgagtacctgatcttggaagggacactacgtccgggcgagaaattaccgcctgagcgcgagctggcgaagcaatttgatgtttcccgaccttccttgagagaagccattcagcgactcgaggccaaaggccttctgctgcgtcgccagggaggcggtactttcgtccagacgaacctgtggcaaagctttagtgacccgctggcagaattgctggccgaccatcctgaatcacaattcgatttgctggaaacacgtcatgccctcgaaggtattgccgcgtattacgcggctttacgcggtacagatgaagatctgcaatgtattcgtgaatgtcatactgcgattcaacaggcgcaagacagcggtgatttagacgctgaagctgatgcggttatgcagtatcaggtggctgttacagaagcggctcataatgtggtgttgttacatttactgcgttgcatgggcccgatgttagaacagaatgttaaacagaacttcgaattgctttactcgcgccgcgaaatgttggcaacggtaagcagtcaccgcgccgggatattcgaggcgattgtggcccgcgagccggaaaaagcgcgcgaagcctcacaccgccacttggcgtttattgaggaaatcttgctggatcttagtcgtgagaacagtcgccgtgagcgatcgctccgacgcctccagcaacgcaaggattaagggcttctcccagtcgggatgggttctaagtgcttattttgagcactaaaagcggcaactaaactgatgagcctatcttccggtgctttcaccagggcgcgtgttttaacctggtttaatcactctggttaaaacacaggaagataggctccaaataaaccattagagacagataaggaataccaccatgtcagaacgtttaattaatgacgtggatccgatcgaaacccgtgactggctacaggcgattgaatcggttatccgtgaagaaggtgttgagcgcgctcagtatctgattgatcaggttttgggcgaagcccgtaaaggcggcgtaagcgtggctgctggttctgagaaccgcaactatgttaactccatcgcagtagaagacgaaccagcctaccctggcaacctggatctggagcgtcgtattcgctctgcaatccgttggaacgccgtgatgaccgtgctgcgcgcgtctaaaaaagatctggatctgggcggccacatggcttccttccagtcttctgcaaccttctacgaagtttgcttcaaccacttcttccgtgcgcgtaaccaaaaagacggcggcgatctggtttacttccaggggcatatctccccaggcgtttacgctcgtgccttcctggaaggtcgactgacccaagaacagatggacaacttccgtcaagaagttcacggcaaaggtctgtcttcttacccgcatcctaaactgatgcctgaattctggcagttcccgaccgtttctatgggtctgggtccaattagcgccatttatcaagctaagttcctgaaatacctgtctcaccgtggtttgaaagatacctcagcacaaaccgtttacgccttcctgggtgatggcgagatggatgagccggaatccaaaggtgcgatcaccatcgctacccgtgagaaactggacaacctggtcttcgttatcaactgtaacttgcagcgccttgatggcccagttaccggtaacggcaaaatcatcaacgaactggaaggcatctttagcggtgctggctggcaggtactgaaagttatctggggcggtcgttgggatgagctgctgcgtaaagataccagcggtaaactgattcagctgatgaacgaaacgctggatggcgactaccagaccttcaaatccaaagacggcgcttatgtccgtgaacacttcttcggtcgtttcccagaaactgctgcattagtgaaagacatgaccgatgacgaaatctgggcgctgaaccgtggcggccacgatccgaagaaagtctttgcagcactgaaaaaagcgcaagataccaaaggcaaaccaactgtaatcctggctcataccattaaaggttacggcatgggtgaaacggctgaaggcaagaacatcgctcaccaggtgaagaaaatgaacatggacggtgttcgtcacttccgtgatcgtttcaatgtgccagttgctgattcagaaatcgaaaaactgccatacatcaccttcgagaaagattccgaagagtacaagtatctgcacgaacgtcgtcaggcgctggaaggctacgtgccaagccgtctgcctaacttcacccagaaactggaaatgccagctctggaagatttcagctccttgctggaagagcagaacaaagaaatctctaccactatcgctttcgttcgtgccttgaacgtgatgctgaagaacaaatcgatcaaagatcgtatcgttcctatcatcgctgatgaagcgcgtacattcggtatggaaggtctgttccgtcagatcggtatttacagccctaacggtcagcagtacaccccgcaagaccgcgagcaggttgcatactacaaagaagacgagaaaggtcagatcctgcaagaaggtatcaacgaactgggcgccgcttcttcatggttggccgcagcgacttcttacagcaccaacgatctgccaatgattccgttctacatctactactccatgttcggtttccaacgtattggcgatctgtgctgggcagcgggtgaccaacaggcgcgtggcttcctgatcggcggtacttcaggtcgtacgactctgaacggtgaaggtttacagcacgaagatggccacagccatattcagtcactgactatccctaactgtatttcttacgatccggcttatgcttatgaagtagccgttatcatgcatgacggcctggtacgtatgtacggcgacgctcaggaaaatgtttactactacctgactacgctgaacgaaaactaccatatgccagctatgccacagggcgcagaagaaggtatccgtaaaggtatctacaaactggaaactctggccggcgagaaaggcaaggttcagttgatgggttcaggcgctatcctgcgtcacgttcgcgaagctgcacagattctgtctgaacagtatggcgttggttctgatgtgtacagcgttacttccttcaccgaactggctcgtgatggtcaggactgtgagcgttggaacatgctgcacccaaccgaaactccacgcgtaccttacgtagctcaggtaatgaacgaagcgccagcggttgcttctactgactacatgaagctgttcgctgaacagattcgtaactttattcctgccagcgagttccgcgtactgggtacagatggtttcggccgttctgacagccgcgagaacctgcgtcaccacttcgaagttgattcttcttatgttgtggttgcagcactgggtgaattggctaaacgcggtgacatcgacaccagcgtagttgcagaagcaattactaagtttggtatcgacgccgataaagttaacccgcgtctggcataagaggtaaagaacaaatgtctatcgaaatcaatgtaccagacatcggtgcagatgaagttgaagtcaccgaaattatggtgaaagtcggcgataccgttgaagttgaacagtcgctgattgctgtagaaggtgataaagcctctatggaagttccctcacctcaagcgggtgtggtgaaagaaatcaaagttgcggttggcgataaagtcgaaactggcaaactgatcatggtcttcgaatccgctacaggtgcctcagcggcacctgccaaggcagaagagcaagcggctgctccagccccagctgctgcacctgcggctagcgcagcgaaagacgttgcggtaccggatatcggttctgacgaagttgaagtcaccgagatcatggttaaggttggcgacagcgttgaagctgaacagtctctgattaccgtagaaggcgacaaagcctctatggaagttccggctccgttcgctggcatcgtgaaagaaatcaaaatcaacaccggcgataaagtgagcaccggttctatgattatggtcttcgaagttgcaggtgctgcggcaccggcagcagcggcgcctgctcctgcagccgctcctgcagccgctccggctgcgccatcggcttcagcggcgaaaaacgttgaagtgcctgacatcggcggtgacgaagttgaagtgaccgaagtgatggtgaaagtgggcgataaagttgccgctgaacaatccttgatcaccgttgaaggcgacaaagcttccatggaagttccagctccatttgctggcaccgtgaaagaaatcaaaatcagcaccggcgataaagtgagcaccggttctatgattatggtcttcgaagttgaaggcgcagctcctgcggcagctccggctccacaagcagcggcacctgcggcagcggctccggccaaagcggcagcgccagcagccaaagcggaaagcaaaggtgaattcgcggagaatgcagcttacgttcacgctactccggtcgtgcgtcgtttggctcgtgaattcggcgttaacctggcgaaagtgaaaggaactggccgtaaaggtcgtatcctgcgcgaagacgttcaggcatacgtgaaagatgcagtgaaacgtgctgaagctgctccggcagcagcggctggcggcggtctaccaggcatgctgccttggccgaaagttgacttcagcaagttcggtgaaatcgaagaagtggaattaggtcgtatccagaaaatctctggtgctaacctgagccgcaactgggtcatgattcctcatgttactcagttcgacgaagcggatatcactgacgttgaagcattccgtaagcaacaaaacgttgaagctgagaagaagaaacaggatctgaagatcaccccgctggtgttcctgatgaaagccgctgctaaagcattggaagagttcccacgctttaacagctctatttctgaagacggtcagaaactgacgctgaagaaatacatcaacattggtgtggctgttgatacgccaaacggtctggttgttccggtcttccgtgatgttaacaagaagggcatcgttgagttgtctcgcgagctgtctgttatctctaagaaagcacgtgacggcaaactgaccgcatccgatatgcagggcggctgcttcaccatctccagcctgggcggcatcggcggtacggcgtttacgcctatcgtcaacgcaccagaagtggctatcctgggtgtgtctaaatcatccatgaaacctgtttggaatggtaaagagttcgcaccgcgtctgatgttgcctctgtctctctccttcgatcaccgcgtgattgatggggcggcaggtgctcgcttcgcagcttacattgccaccattatggctgatattcgccgtctggttatgtaatagcttaggccggcctagcgccggccttattattacttagcttatggttatatcactgatagttatgaaccgaccttgtttcgctcgttacattagtagacaaggttgttgagacactcgtcacgcgatgcggcttttcagtctattaacaattctgtaaactgctcgcagtgtaagcgtcccggtggatgaagggcgttatgaactttattagcctaataaatgacgtctgacccgccggacaaacaattaagaggtcatgatgagtactgaaattaaaactcaggtcgtggtacttggggcgggcccagcaggatattctgctgcttttcgttgtgcggacttaggtctggaaactattctggttgagcgttactccactctgggtggtgtttgcttgaacgtgggttgtatcccgtcaaaagcattgctgcatgttgcaaaagtgatcgaagaagccaaggcgctggctgagcacggcattgtttttggcgagcctaagactgacattgataaagttcgtgtctggaaagataaagttatcaatcagttgaccggtggtttggcaggtatggctaaaggccgtaaagtcaaagtagttaacggtttcggtaaatttaccggtgcgaatactttggtcgttgaaggtgaaaatggtccaaccaccatcacctttgataatgccattatcgctgcgggttctcgtccgatccaactgccattcattcctcatgaagatccacgcgtgtgggattcaacggatgcactggcactgaaatctgtcccagaacgtctgttggtcatgggcggtggcatcatcggtctggaaatgggtaccgtttaccatgctctgggttcgaaaattgatgtggtagaaatgttcgatcaggtgattccagcggctgataaagacgtagtgaaagtattcacaaagcgtatcagcaagcagttcaacctgatgctggaaactaaagttacagcagtagaagccaaagaagacggtatctatgtaacgatggaaggcaaaaaagcgccagcagaaccacagcgttacgatgcagttctggttgcgattggccgtgtacctaacggtaaactgctggatgcgggtcaggctggtgtagaagttgacgagcgtggtttcatcaacgtcgacaaacagctacgtacgaatgtaccgcacatctttgcaatcggtgacatcgtgggtcagccaatgctggcacataaaggtgttcatgaaggccacgttgccgctgaagttatcgccggtatgaagcactacttcgatccgaaagtgattccatccattgcgtacactgaaccagaagtcgcatgggttggtttgaccgagaaagaagcgaaagagaaaggcatcagctacgaaacctccaccttcccgtgggcggcatctggccgtgctatcgcttcagattgcgcagacggtatgaccaaactgatcttcgacaaagaaactcaccgtatcatcggtggtgctattgtcggtaccaacggtggggaactgttgggggaaatcggtctggcaattgagatgggttgtgatgcagaagatctggcattgactatccatgctcacccgacgttgcacgaatccgttggtttggctgctgagatttacgaaggtagcattaccgacctgcctaaccctaaagcgaaaaagaaataatttctgattgctgatgtgttagttaaagcggctcctgattcaggggccgttttttattgggaaaaatgtgtcaatgaacggaatcagttaacctgcggtactggcggcaatggttcatcggtaagagccagcatgtcgaccttgaagcttgagccatctgctgattcttctatatttgtgacaaggaaacggcttttaggcaagaagatacgctcctctccaggctcgtcgagtaattcgctgatatcagtgctgttggtgcgttcaagaaaatattttatggtatatctgacgttgatttttccctcttccagctcttgactattgaattggtcgataagttcttcatccgcggtagtgcttaagaatgtatctatttgaatggtttcttcaggtataactttagataagaactctgcgcgatctctgacttcccctcggtaaacttcgctaacgctgctctcttcttcggaaataatatagccgctctcacgtaatgagacattaatatcagaatggttatctaatgctgtgtagacttccgttatttctgtttctaaaccatcattagtggttccatttctcagagcattatttatggccacaaatctatcttcctgaaagtttctaatggcaaagtattctcggaagtttattttttcatgtgaaaagtttgaattatagcgttgtatttcatcgtcaatatttaggttgcattcatctaatttcgtttttccatatataacttcaagttcctcttttattgttgaagtatcattaggtgttatcggtgccatttggtcaattctattcttgtccatcataagattcccttcaacatcataggcatctaccgaagtagaagagtcgtaagaggatgaagaagccgagtcggttgatgaagagttgctgttatccggcggttttattctggggattttagggggaggttcatcacttaaagtggggggatgggtatcaccgaacaggaaaccgaccttgccatttactctctgtagtcgatccgaaattttgggtttaggcttcgatgcggcgggtaatagcggggttcgctctggattgactccgatttgtgagcctggcctagcgatactgactctgggttttgctgccgtagtcgctccgggcttggcaccaaaggtgactttaaaccctctgggctgcggggttgggcccatacttaatacgccgagactgatttcaaacgcgatttcttcgtcggttttgggcggtgctttcccctgatctttcgggacggttttacaaggaactccgcgttcccatttacaatggcgtgactgaaaattggaccagctttctttatttgattgccatctaggttgagcttctcgtccatgggaaatattcaatgctaatgttgtaaataataaagttgaaaatgttatagttaatttcatattcactccttatttgatgagaacgcttttataatataaataatgttataagcacggcctagggtttcaaaattagcattgaattgtaaatttgaatttataaggtaagtggatttgattttatataatgactattacgtatgacgattaattaactgtattatattaattaaggataaaaaccttcacgaatttgcctcggagtgatattaaacgtgcgacgcagtgcggtcgcaaaatttgcggagctggtatatccggcaatggcagcggcttgatcgatactgactccttctttttttaaggccagcatggcgcgcttcaatcggcaatggcgcaaatactcaaataccgtcacgttataattctctcggaaacggcgttgcagcgtgctgggactcatattaattgactgagccagttcttgcagtgaaagttggtcggcttcgccgctttccagccagtcacgtaactgttgaatccgattcaagccacgcagagatattttgttttgctgttggcttgattgttccagtgagctgaatgcctcgataatcagaccgatacactggctttcacatcgtaaccgctccagtggcgtgcggtaggggggcgcacttgctatttgctgggcgatggaaatcgcctggacagatggttgccataaatgaattgccagatgttgctgagtgaagtcgtacagtttctcccatcctccttcctgcggcagcaaatccccatatagccattcgcggtcaaaggtcagcgttaaagtgcgttcatgaccatttttctttccatgccgggtaaataaggtgttctcaacgagagaaatcagagaggaaggccctttctcatgtagctctaatggtttgccaccaaaggatatattcgcgctgccgctcaccacgatagccagtttgagtgagggcgccagacagttctgcgttttgatgtcgtaaagattagtgacattcgccgtatgcagaattaaatgggggttgaggcgcagtacctggaaatcaccaaatagcaccgggtcagtgacagaggatttccctccgcttagacgatagtcgctggcgaccaaattggattgttgcacaatttgctcgggatagatgggtttagaagaagccgaaaccttgcgcatactattttttttcatcgcagacaagatgagccccccttgagcattgtctccatactttttacccgatgacattgacgctgcggcaaagagctttgccgttttcacaaacctttttcctgtagcgcaatgtaacaattagcgcgccgaatgggtaatgaaaataattatcaatcttgtttgtttttgttggctcgttaatcagtcgtcggggactctctccgccgcgatgtgttgcgggcgccagcactagggaaatttttataatgatgaatgtcaaatggcagcggcgctacctggcggccatgatcggcctgtgtctctccacaccgttgtgggcgcaagctcaaaataatatcaaaaccggtacggataccacgtcaaccgaacaaccggaagccactgctacatctacatcgaaaaaaaccaatgcgctagccagtggcgacactttggtggtaactgcagagcagcaggtacgacaggcgctaggcgcttcggttatcaccgcggaagatatacgcaaacggccgccggccaatgatttatccgaaatcatccgaactatgccgggagtgaatctttctggcaattccgccagtggtcagcgcggcaataaccgtcagatcgatattcgcggtatggggccggaaaacaccctgattatgatcgacggcatccctgtttccagtcgcaatgcggtacgttacggctggcgcggcgagcgtgatactcgcggtgataccaattgggttcccgccaatatggtagaaaaaatcgaggtgttgcgtggtcctgcggcggctcgctatggcaatggtgccgccggtggcgtggtgaatatcatcactaagcagccgaacaagcagctacaaggtagctggaatgcttatatgaatgtgccgcagcacagtaaggaaggggcgacccgtcgcactgactttagcctgatggggccactaagcgatacgctcagcttccgtttatacggcagatacaataaaaccgatgccgatgagtgggatatcaacgccggtcatgagtcattgcgcacgggtaatcaggtcgggactttacctgccggacgtgaaggcgtacgtaataaagatatcaatggcttattgcgctgggatttcagtcccggtcagtctctggaattccaggcaggctatagccgtcagggaaatatttacgctggtgatacgcaaaataccaacagtaacgccattgtgcgcagcctgtacggtgctgaaactaaccgcatgtatcgtgagaatgtctcggcaacccaccgcggattctgggatagcggcgttagcactacgtcttatcttcaatatgaagaaacccgaaattcgcggatcagtgaaggtttggccggcggtaccgaaggtattttctcaaaccgcggttttaataccatcaccctggataattacgttgcgcacagcgaagttaatctgccgttcgagtggggcgtaaatcaggtcgtgaccattggggcggagtggaacgatcagaaaatgcatgatccagcctccaatactcaaaccacgaccgaaggcggtagcgtaggcggtttgaaggattccgggcgcaatacgcgcacatcggcgcacattgcttctctgtttgtggaagataatatcgaactgacggaaacgaccatgttgacgccggctgtgcgctacgatcatcacagcaaagcagggagcaactggagcccgggggtgaacctttctcaggcgttgggcgataattttacgctgaaaatgggtattgcccgcgcttacaaagcgccaaatctgtatcagaccaacccggactatctgctatatagccgtgggcaaggctgttacggtggcggcgggagttgctatttaatggggaacgagtctctgtcggcggaaaccagcgtaaataaagagatcggtctggaattccatcaggatgggctgattgctggtgtcacttacttccgtaacgattaccgtaataagattgagccgggtttgatatcaataggtaatgccagcggtgggacaggcgcctacgtggattcagatattttccaatgggaaaacgtgcctaaagccctggtggaaggtctggaaggcagcctgacggttccggttactgatgatgtgcagtggagcagtaacctgacctacatgctgaaatcggagaacaaaaccaccggggattatctttccatcacgccagagttcaccttgaatagctctctgagctggcaggcgacagacgatttatcgttaatgaccaatgtggtgtggtacggtcgccaaaaaccgaagaaattcgactatcagggaaatctggtcacaggtactgcgaccagagaagtcagtccttacgcggtatttggtctgagcggcagctatacgctgactaagaatgtcagtgtcactactgggattgaaaatctgtttgataaacgccagttccgtgcgggtaacgcgcagagcgtggcgggtattgaaggtgccggagccgcgacctataacgaaccgggacgcactttcttccttagcctgaatacgcagttctaatcgttaattttattgaataaaatcgatagcccgtagcgatacgggcagtttttgataacaaatatccgcgcaatcaatcatctgttaacccccagtgacaggctagaaataaagctacttcacgagtgaaacagcaaatggttttgggctatcaaactcccaccgcctgatttcttaaccataaaaattgaccgttatcggattgaccttattttctgctccctatgctaacccttactcctatcagcctgatccgcaatacataacctgcacggagagatagtatccattgcaaaaatatggttattatgttgcggagtatttatcaccgaaaccacttggttagccacgaattgatattccaaacaaatttttcaggtgattacactgtgctcaacgattcagcaaaaatttaatgttgcttttatgtgaacgaattaacaaccagttcagatcctgatatgctggctgcgcagaaccgggcacttaccctacaactttaggcatcgatttcggtgaccggagagaacggttagccaggcaaaataaatgataatgaaagcgaggagaatgtcgtgctagaagaataccgtaagcacgtagccgagcgtgccgctgaggggatcgtcccgaagccattggatgcatctcaaatggccgcgctggttgaagcattaaagaatccgcctgtgggcgagcaagaattcctgttagacctgctgattaaccgcgttccacccggcgttgatgaagcagcctacgtaaaggccggtttcctggccgccatcgccaaaggcgacgcaacctctccactgattactcctgaaaaagccgtcgagttgctcggtactatgcagggcggatataatatccatcctctgattgatgcactggataacgaaaagctggcacctatcgccgctaaagccttatctcacacgttgctgatgttcgataacttctatgacgtggaagaaaaagccaaatccggcaacccgcatgccaaacaaatcatgcagtcctgggccgatgcggaatggtatctgtctcgcccggcgctggcggataaaatcaccgtgacggtgtttaaagtgaccggtgaaaccaacaccgatgatttgtctccggcacctgatgcctggtcgcgcccggatattccgttgcacgcactggctatgctgaaaaatgctcgcgaaggcatttatcccgatcagccgggcagcgttggcccgattaaacaaatcgaagaactgaataagaaaggttttccgctggcttacgtcggtgacgttgtgggtaccggttcttcccgtaaatctgccacgaactcagtgctgtggtttatgggggacgacattccttatgtgccgaataagcgcggtggcggtgtggttttgggcagcaaaattgcgcctatcttctttaacacgatggaagatgccggggcattaccgattgaagttgacgttgccaagctgaatatgggcgatgtgattgatatcttcccgtatttgggtgaggtacgtcggcacgataccggtgaagtgctggcgacatttgaactgaaaaccgatgttttgctggatgaagttcgcgccggtggtcgtattccgctgatcgtcggccgaggtttgaccactaaggctcgcgaagccttaggtttgccaccgagcgaaattttccgtcaggccaagccggttgccaaaagcaataaaggcttttctctggctcagaaaatggtcggtcgcgcctgtggcgttgatggtgtgcgcccgggtgaatactgcgaacctaaaatgacctccgtgggatctcaggataccactgggcctatgacgcgtgatgagctgaaagatctggcgtgtctgggtttctccgctgatttggtgatgcagtcattctgtcataccgccgcttatcctaagccggttgatgtgaccactcaccatacgttgcctgatttcatcatgaaccgcggtggggtttccctgcgtcccggtgacggtatcattcactcatggctgaaccgtatgctgttgccggataccgtcggcaccggcggtgactcccatactcgtttccctatcgggatttccttcccggcaggttcgggtctggtggcgtttgctgctgcgactggcgttatgccgctggatatgccggaatcggttctggtgcgctttaaaggcaaaatgcagccgggtatcactctgcgtgatttggtacatgccattccttattacgccattcaggaaggcttgctgaccgttgagaagaaaggaaagaaaaacatcttctctggccgcattctggaaatcgaaggcttgcctgagctgaaagtggagcaggcatttgaactggccgatgcttcagccgaacgttctgccgccggttgtaccattaagctggataaagcgccgatcgaagaatatttgaaatctaacgtggtattgctgaagtggatgattgccgaaggctatggcgatcgccgtactttggagcgccgcattactggcatggaaaactggctggctaacccgagcctgttagaaggggatgccgacgcagaatatgccgcagtgatcgaaatcgatctggccgagatcactcaacctattctgtgtgcaccaaacgatccggacgatgctcgcctgttgtctgacgtagcaaacagcaaaatcgacgaagtctttatcggttcatgcatgaccaacatcgggcacttccgcgccgccggtaagctgttggatcaacataaaggtcagctgcctactcgcctgtgggtcgcgccaccaaccaaaatggacgccgctcagctaacggaagaaggctattacagcatctttggtaagagtggggcgcgcgttgaaattccgggctgttcactgtgcatgggtaaccaagcgcgcgtggccgatggggcaacggtagtttctacctcgacccgtaacttcccgaaccgtttgggtaccggtgccgatgtgtatctggcttcagctgaactggcggctattgctgctttgttaggccgtctacctacgccggatgaataccagacttatatggctcaggttgataagactgcggttgatacttatcgttatcttaatttcgataaattaaatgaatatacagagaaagctgacggcgtcattttccagactgcgctgtaagctattttttgtattaatcattaattttactaataaattgaagggggccgatggcctcctttttattgccttgtattccgtgctacgggcgatttcctccgtgatttctgagtattactcgcgatagatcactctaggtttcgtttctgacagagtgagtgagcggcatttgattctctatttatcacctgttctccccgttgaatgccttgtcgaaacattagattatctttgttatccactgcaatagactacgctttcaaagcagccagcggctgtaagcgtgcgttaatcctttctttttcacagcggaaattacctaatgacgacacagacctccgattcatattcgataaaaaatcataataggatggcaggtaagcgtgtacttattactggtggtacatcgggtatcggtttggcagcggcaaagctaatgttgcagcagggcgctcaggttgcgattacggggatcacaccggaaagcctggagaatgcctgtaaaactctgcccgcagccagaatttatgccagtgattccggcagtattcagcaacagaggagattggctgaaaaagttaaacaggattttggtcagttagatgccttggtactgaatgcgggaatggggatttggcattcactggaagattggaccgaagctgattttgatcggcagatgtcagtgaatttcaaagggccgttcttcttactacaagccttaagacccttgctgagcaacccggcctccgtagtgataaccacttccattgccgctcatcgtggcttgcttggtgcgccgatttacggtgcttccaaggcggcgctgctggcggtaatgcgtggtttaaccacggagttggccggcgatggcatcagaatcaacgcgatttcacccggcccggtgaatacgccaatattgtataaacagggaatggatggggataaattccacgagcagtttacgccgctgcttccagtgcaacgtttcgctgaagccacagaaattgctcaggctatcctgttcctggcgtctgatgaatccagctacttgtacggaagtgacatcgtggtcgacggcggcctgatggcaacattccccggctaatgcagataagtaggatgcaaacctttcaaactgcggtttaagccgctatatttcgcatctaaatacgcggggggccaagggtctcccgtttttattgggtgtaatcgcaagatgttgcataactttgcgagcttggacttagttagcccgccaataatgtttaaactaatagtaagagcaataggagggcgtgctatggactatgaatttttgcgtgatctaacggggcaggtaatcgtcagattctccatggggcatgaagtgatcggccactggctcaatgaagaaattaaaggtgacctgactaaactcgatgagatcgagaccgccgcggctcaggtcgccggtagtgaacgccaatggcagcaggtgggtcatgaatacactttgtggctggacggtgaagaggtgatggttcgggctaaccaacttgattttgaaggcgatgaaatcgaagaaggtatgaactattacgatgaagagagcctctgcatgtgcggattagaggatttcctcgccgtgttaaaaggctaccgagcctttattctgaaatattgatttttatttttctcttggtgaggctggcgatcggctggcagaccaacacagcagcgaaccggctaccaccattccgacgcccgggagaaatgcggctgacggcggcgtactgagccataaactggcgatcagtactgacagcaaaggcgtaaaatatgaaagggcagcgaccaacgtggcgttgccctttttcatggcgctatcccagcattggtaggccagcgcagtactacagcccatcatcaacagctccatgactgcccgcggtgtaaaatgaagtggccccggtgtcagggtaaaaaacagtagccacaggcacagcgcacaggccagaagaaacagcggcagtacacctcggccacgactataaacacgcaccagattggagtaaatagcccaggcaaaggcagcgagcagcgctaagctataagctagcgggttatggttgatattcgtggccaagatactgatatccagaccatttccaccgctgacaacccaaataacgccgaataaggcaatggctgcccctaaccatagccaccagcgggtgcgtaaccgcagtagtacgacggcgaaaagcagagtgaggctgggccacagatagttgattaggccaatttccagcgtctgttggcgatcgctcgccattccgatggcaatagcaaaggcaaccatataaataacgaataacgcaccgcatccccataaatatgctggatgctgcccgcgaatctgcggtttaccgcccaccagccagaccagtattccgctgacgctatagatcgccgctcctgcaccaaaggggcctaaggtttcggctaacccacgcgtgagtgcgacactcatgctccaaagtaaaatagcaactatgcccaataatgtagcggtacgttccatgtcggcaggctcagcgtcggcgatgaaatatcagccagccagagtacgacattcgagcaggaaaaaatgggatgatgggttgatttatcgttgttttatcggaaagaaagcgtggcgaggataaaaaacacaggcaggaaaacctgcctgtgagccatttcgcgtcgatcatacttccggaacgttgcgcccgtagtagatttcctgcatttctttgtacagcaaacgagtgatggtttctctttcttcatcgctcagttgttctggcttggcgttaaacagatagtgcttcagatcgaagtctttcagcatcatcttggtatggaacatgttttcctggtaaacgttcacatccatcatgtggtacagcgacttcatatcatctgacataaagttctggatcgaattgatctcatgatcgatgaagtgcttcacacctttaacgtcacgggtaaagccgcgtactcgataatccatagtcacgatatcggattctagctggtggatcagatagttcagcgctttcagcggtgaaataacgccacaggtagaaacttcgatgtcggcacggaaagtacatagcccgccttcaggatggctttcaggataggtatgcacacaaatgtggctcttatccaaatgagcaaccacggagttaggcagcgggccgggatgttctgatgtatcgacatcacgaggatcgatgggctcttcgctgactaagatagtgacactggcaccctgaggatcgtaatcctgacgagcgatattcaaaatattcgcgccgatgatcgagcaggtttcgctcaagatctcggtcaagcggttggcattgtattgttcgtcaatgtaggcgatatagccatcgcggtcatctgcggtcttggcataacaaatatcgtaaatacaaaaactcaggctcttggtcagattgttgaagccgtgcagtttaagcttgtgcaatttagttcacctccttacggattaatactcaacgttttgtggaaagtgcattcagcagatactgtggcagggcaaagctaccgacatgaattgctggattatagtaacgacaggtcaggcctgcgtgttcaaaccgggcttgcagtgtagcgagatctaactgacgcagcgccgggttttgcgtagcccaggcaaaggtcatgataccgccgtaatatgtcggaatggctgcctgatagaaactgacatcgccgaaatagttgctgagttttttgtggctatcgacggcttcatcctgctggaggaaacacacgccattttgcgcgacgaaaataccgccttcgttcagactacgggcgcaaccttcgtagaatgccgaggtgaacaggctttcgcccgggccgattggatcggtgcagtcagagataatgacatcaaacttttcgttggtctgattaacgaagttaacgccgtcgtcgattaccagtttgaagcgcggatcgtcataggctccggcattgtggttcggcagatactggcggcagaattctacgacgccggcgtcgatttccaccatggtgatttgttcaacggtgctgtggcggctgacttcacgcagcatggcaccgtcgccgccgccgatgatcaacactttcttcgcctgaccgtgagccagcagcggaacgtgggtcatcatttcgtgatagataaactcatcgcgctcggtagtttgcactacgccgtccagcgccatgacgcggcctaaaaccgggttctcgaagatcaccagatcctggtgctcggttttctcgcggtacagaatattctctacagagaaatactggccgaaattggcatggagcgtttcataccaaagctctttctgggacatgttagggctctcctccgcggtaacagccatgaaaaatgggcgcaacatcatagccaactctgcccgaggttgcacggttgaatttcagacagaggctattagggcgaattattagttggcgtaggccaataaactcagtgaatcgcgtgccaggaatttgcatttggtgggaaccggaatggcgatgccgcgcaaatcgcgatagctctcttcacccaggtctttcatattgaagctattatagttacgtaaatcccaacggttctgctgggcaaaatacacaatcgcccgcttaatttccgtattaggtagttcgttgtagccgcaatcattcttcagataaacgaaaaccgcagtgagatcggcaagatcttctgcttcggattcggttaaagcttggctggcagatgaaaatccacacagagcgagcagcagcacgactaactttgttcttttcatggcggaaatttgcttatttaattgtcaataaacgttaacacatttggacagtcccacactaaattttcttatagaaccttggtgtgaacgcacagactgggttattgcctcttgaccttaccgcaaggggagggtttaggctcttcactaattatgtactgtgctgcattttctgcactgattaaacattttgaggagacgaccatgcttcgccgtgatttcatcaaattgacggcggctcttggagccgccacttctctgcctctctggagccgagcggcttttgccgctgagcaccctagtctgccgattcctccgttgctacaacctgatgccagcggcaaaatccaattacaactgcaaaccggtagcatggtgtgggttcccggtaaaacgactcaaacctggggagttaacggcggatttctcggcccggcgattcgcttacagcgtggtaaacctgtcactgtaacggtgaaaaataccttgccggaagcgaccacggtacactggcacggattggaaatacccggtgaagtagacggcgggccgcaggctctgattgagacgggcgcgacgcgagaagtgacctttaccgtcgatcaaccggcggcgacctgttggttccatcctcatacccacaataaaaccggctatcaggtggcgatgggattgggcggtctggtactgatcgacgatgacgaaagcagcaaattaccattgcccaagcagtggggcgtcgatgatattccggttattttacaggacaaattgctggataaagacggacagattgattaccagctagacgtgatgaccgcagccgtaggctggtttggcgatcaaatgctaactaacggcgcgcgtttcccgcagcagattacgccgcgcggttgggtgcgcttgagggtactgaacggctgtaacgcgcgatctctcaatctggcgttgagcgatgggcggccaatgtatgtgattgccagcgacggtggcttcctgtcggaaccggtagcggttaaagaactgccgattttgatgggagaacgcttcgaaattctggttgataccgccgatggcaagagtgtggatttagtcactctaccggttaagcaaatgggtatgacattggcgccgtttgatcaaccgctgccggtattacgtttacaaccgtcactggccgccggtagcaaagtactgccggatcaactggtagtgttgcctgcgctggcttcgcttgatggattgaaggaacgctggctacagctgatgatgaatcctcagctagatatgctcggaatgcaggcattgatgacgcgctacgggcatcaggcaatggctggtatgcgcatggatcagcacggcggcatggcgatgatggccgaaagtggtaagaacagcggcggctcaatgggcggcatggatcacggtgctatggggcatggcaacatggccggaatggggcacggggcgcaaaaggccgagagcttcgatttcagccacgccaacatgattaatggtaaggcgttctccatgaccgaagcggcgtttgatgccaaacaggggcaatacgagaaatggaccatctcaggtgaaggggacatgatgctgcatccgttccatattcacggcacccaattccgtatcttaacggaaaatggtcagccaccggcggcacatcgtcgcggttggaaagatacggttcgggttgaaggtgctcgcagcgaagttttggtgcgctttaaccatttagcgaccgccagccagccttatatggcccactgccatctgttggaacacgaagataccgggatgatgctgggctttaccgtcagcgcttaacccgattccccggaccacacgcgtccggggctatttaccttcataatcaactatctgccatttccttcacctgcccttattgcgcacgcgtcgcaactactttcccgctatgctaaactcagcggctttcttcaggtaaccgacgttaaaaacttatgaaacacaccgtagaagtaatgatttccgagcaggaagtaaaagcccgtatcgccgaattaggcagtcaaatcaccgagcattaccgcgacagcggcagcgaaatggttctggtcggcttgctgcgtggttctttcatgtttatggcggatttgtgccgcactatcaatgtttctcatgaagtcgatttcatgacggcctccagctacggcagcggtatgacctcaacccgcgatgtaaaaatcctcaaagatctggatgaagatattcgcggcaaagacgtgctgatcgtcgaagacatcatcgattccggtaatactctgagtaaagtgcgtgaaattctgcaactgcgcggcccaaaatctctggcaatctgcaccttgctagataaaccagagcgccgcgaagttgaagttccggttgagtgggttggtttcaagattccagacgagtttgttgttggctacggtattgattacgcgcagcgttatcgtcatttgccgtatgtaggcaaggtggtcatgctcgacgagtaatggtggtcggtactgcgcgttcgcactttaaggttgggaagtgctcgctatcctcatagacagaaagtccactccggtagctgcgcgccaggctagagtctgtagaaataaccaagggcacaatgtgcccttgacgtgttacatcgctttgccttgtaataatgtcgccatcgcttttcggtagaccatttccagactgcttaggctggtggccgaaacctctaaatcgcgcagcaaaccatcttcaatgccgtaaacccaaccgtgaatcatcgctttctgcccgcgtttccaagcggagcgcacgatagtggagtgaccaaggttgtaaacttgctctacgacgttgatttggcataacacgttgctacgttcttcctgcggtagctcgcccagcaaagagctatgtttgtaccacaggtcgcggatgtgcagcagccagttgtcgatcagccccatttcctcgcctttgattgccgcttcaacgccgccgcagccgaggtgaccacagataatgatatgttcgacctgcaatacatcaatggcgtattgcaccacggacagacagtttaaatcggtatggataaccagattggccacattgcggtgaacaaataattccccggacttcagtccggttaactgctccgcaggaacccggctatccgaacaaccgatccacaggaagcgcggtttttgcgcttgggccagatgctcaaaaaaatcaggatcttgtttgctgatggagtttgaccagctgcgattgttcgcgatgagcttttggatttcttccatcgatgttaataacctgtaataaacgaattgcgataggataatatacggcaagcattatgatttagaaatcggaacagttgtttcgggtgagatacaatgttgtccgcgtcacgtcttcctggcatttatcgggtttccctctgctccctgtgacttgtctctcgtcaaatcagcaggctaacccattgatatttagtcccgaaagacattcattgaataaggttcatgtttacttatgacatatgcactggaattaacgcagttgaccaaaacctacgctggtggcgttcaggcactgcgcggtattgatctatgtgttgaggcaggggatttctatgccttgctcgggcccaacggtgccggtaaatcgaccactatcggtattattagctcgctggtgaataaaacctcggggcaggtacaggtatttggttacgatattgataaggatatcgtcaatgccaagcgtcagctcggtctggtgccgcaggaattcaactttaatccgtttgaaaccgtgctgcagatcgttattactcaggcaggttattacggcgttacccgccgtgaagcgctggatcgcgcagaaaaatacctcagtcagcttgatttgtggggcaaacgcaacgagcgtgccattcgcttgtccggcgggatgaaacgtcgcttgatgatcgcccgtgcgctgatgcatcagccaaaactattgattctggatgaacctaccgctggtgtagatatagagctacgtcgttcgatgtggggcttcctgaaagagctgaatgcgcagggcaccaccattattttgactacgcattatctggaagaagcggaaatgctgtgtcgtaacatcggtattattcaaaacggtgaactggtggaaaacaccaccatgaaacagctattgagcaagctagaatcagagacttttatcttcgacctgggggcgaaaagcgccttgccgcagttggaaggctaccaatatcggctgatagatacttccacgctggaagtggatgtgaagcgcgatcagggtttgaacggtttattcagccaaatgagtgcgcagggtattcaggtattgagtatgcgaaacaaagccaaccgtctggaagagctgtttgttaatttggtcaatggcaacgggggagaaaaagcatgacccgcctgtattggatcgctctgcaaagtatctggatcaaagaagtgactcgatttggtcgtatttggattcagacattggtaccgccagtcatcactatgtctctgtattttgtaatattcggtaatctaatcggctcccgtatcggtgatatgggcggggtggattacatgcagtttatcgttcccggcctgattatgatggcggttattaccaactcttacgccaacgtggcggcctcgttctttggcgccaagttccagcgcagtatcgaagaattactggtagcgccggttccaactcacatagtgatcgtcggttatgtgggcggcggcgtggcgcgtgggatttgcgtcggtattttggtgacaattatttctctattctttgtacctttgcaggtacattcctggtcaatgatcgctttaaccgtgctgttaaccgcgattctattttctctggggggcttacttaacgcggtatttgccaaaaccttcgatgatatcagcctgattccgacctttgtacttacgcccttgacctatctgggtggcgtcttctactccttgacgctgttgcctcctttctggcaggcggtgtctaagctgaatccaattgtctatatgattagcggattccgctatggcttcctcggtattaccgacgtgccattggtatttaccattggggttttggtgctgtttatcgtcgtgttttatggctcagcctggtacctgattgagcgtggccgtgggttacgcacttaatttcaaccttcaggtattatcgttaaaaggacagcactgagctgtcctttttgctatttgcatcgttaaacataaaattctgaaactaaattaatcgtaataattaatgatcttagtgaatatggtctttctcacgctttagcatctcatgctatgctggcttaccagaactctctctttcattcagcgcagttacgcgcataagtagaacgataatgtggcataaaaacagaatagcgattgggatgctactcgttattgtcatgtcggtaatcattccggcagcccatgcagacctcctgcaagaagaaacggcagtgccttctaggtacatggtcgccgatcgtaacagtgaaatttatgcgctgattggtgagcatgtgattcccgttggcgaggttaaaaaagggcagctattacaggttttcccggccgcggcggaatattatgaattcaagtttggccacggcatcggttttattgataaagacgatctgcgtgagattaataaagcccaaaaaatgaatgacagattaggcgatctgaataaaccaacgcctaatcaaaatattctgaccaagcgtgcgaccaaaatttatcttgagccggataccgctagcgaagaacttggcgtattggaagagaatctgcgttacccgattattggcaaattgaaagatcgcctgaataacagttggtatcagatcaacattggcgatcgcttaggctatgttagcggcaatgaaactgaaattgataatggcattccggtgctgacttatcatcatatgctgaaaaatgaagagaataagcgctttaggaatacctcgaccaccacgtctgacgtggcgttcagtaatcagatggcgtatctgaaacaagctggttatgacactatttcgatgtatcagcttgaggcttacttgaataatcaaatcaatctgccggcgaaagtggtcgtgctaacatttgacgatggtttaaaatcggtcagccgttacgcttatccaattttgaaagaacagggtttccgcgctactgcatttattatttcttcgcgcatcaaacgccatccgcagaaatggaaccctgattcgctacagtttatgagtatttcggaactgaaacagattcaggatgtatttgacgttcagtctcacactcatttcctgcatcggaccgataacgcacgtcatccaatcttattgagccgctcttaccataatgtcatttttgattttgagcgatcccgacgggcattatcgcaatttaatccccacgtgatttatttgtcttatccgtttggcgggtttaatcagaatgcgattgaggcggcaaagaattcaggtttccatctggcggtgacgaccatacaagggaaagtcaaaccgggggataatccgtttaccttaaaacggctatacatcttacgcaccgattctatccctaccatggctgagcgcatcgccaaccagccgggagccgttgtagccaagactataccagcggtgattgaggctgagtaggtttgcgaaaccagtctcgtcgatcaaagagaaaggagcctaaaatggctccttttttacgtattgagtaagacgattatatcggctaacgaaagggcgtattgccgtgcctaaatcgctaggcaacctgcaccggaaccgctttggctttgcgctgtagttggttgtcgccttcgaaataggccactttaggatggtgcaaacgggcgtccacgtctgacatctgaacgtaagaacagataatcagtttgtcgccaacgcaagcgcagcgcgctgccgccccgttgacagaaataatgcgtgagccacgctcagccgcgatggcgtaagtagaaaaacgctgaccgttatcaacgttataaatatcaattgcttcgtattcgagaatcccagcggcttccagaaaatcctgatcgatggcgcaggaaccttcatagtgcaaatcagcctgagtcactttaacccgatgaagtttgccttgcagcatagtacgtatcatagccttacccttaaccctaatgtaaaccagcgaatctctgccaggcggagttctctggatgaataacgctgatggcgtcaatactgaggcagcctgcgttcagtatatcgactcagttttgccgattttataggtgctgtctatatattggcgaagcctaccgtaagataaattatgacgaagaatatttctgttggaagactaatggcatggggaataatcaagtcggatacgaactgagcacagagtattttgcttcaggccgtatccggtttatcggataaatgcgaggttagttgattaaatcaacctgctgattatcgatcaaacgggcttttcctaaccaggcggccataagaatcaccgcgcgctggctttcaacggtcagcggttgtagtgtttcagcatcacggataaacagctcatccggagtgaagcccgctgcgcgaagctgttccgccgtggttgccagcaattcatcaatctgacgctcgcccaaggtgagtttttcagccagatcgttcatgattttcgccaactgaggcgcaatcttgcgttcttctgcagtcaaatagccgttacgagagctgagtgccaaaccgtctttggcgcgcttgatcggcacaccgataatctcgatgtcatagcccatatcggctaccattttgcgaatcaacgccaattgctggtaatccttctcgccgaaacaggcgatatccggttggaccagattgaacagtttgctgacgatggtggaaacgccacggaaatgaccggggcggctggctccttctaaaatggtcgataaagcggggacatccacgtaagtctgctcttctaaacctgctggatagacttcgctggctgcgggagcgaacaccagatctacgccttggcgagtcagcttctcacagtcttcctgcagggttcgcgggtagttggctaagtcatccgggcgttcaaactgcatgggattgacaaagatacttaccaccactacatcggcacgggctttggcttcttccaccagagcaaggtgtccatcatgcagattgcccatggttggaaccaacgcaattcgtttgccatcctgacgccaacggcggatttcctgacgtaaaaacggcagggtttcgataatcagcattccctttctcctgagttattggaagcagtgctcttcagccgggtagattccctgctcaacttcctgaatatattgttggatcgccaaacggatatcgccagcctgagccaaaaagtttttgctgaactttggtgtatggccactagtgataccgagagcatcatgcataaccaaaatttgtccgtcagtaacatttccggcgccaataccgataaccggaatggccagctcttcagtgactcggctcgccagttctaccggcacgcattccaacaccaagagctgagcgcccgcctgctcgagcgcaatggcgtctttgagtaattggttggctgcaacttcttcccgaccttgtactttataaccgccaaatatattaaccgactgcggcgtaagccccagatggccgcaaaccggcactgcgcgctccgccagcatgcgaacggtatcgcacagccagcttccaccttccagcttcaccatattggctccggcgcgcattagctcggccgcgtgggtaaaagtttgttccggcgtggcataactcataaagggcatatcggagagcaggaggcagttaggcgcgccgcgacggactgcgcgggtgtggtaagccacatcggcgacggtgactgggagagtggagtcaaagccctgtagcgtcatcccaagagagtcacccaccagcatgacctgaataccttgctcatagaatagttgagcaaagctggcgtcataggcggtgagagtcgcaaacttacgcttttcctgtttccattggcgcaagtgggtcagagtagtcgctttcattattcgttctccagaaaataacccgacagacccgaataacggagcgttatcacacttgcggcctgcaatcagttaacgccagtctaccgctgattagtgcatgtagataaggcagttacattataaatatagtggtctgaatgctagcaaactctcggcaggaatgcacagaagggataaaaggtaggaaggggaacgcgagatagctcgcaacttaatttgcaattaccaagggataaggccgttctttggcaccaatttaaggcgatctaccagggattctccgtcggggaaaatcaagtctggcgcgatgtctgctagcggatacagcataaactcgcgctgtttcagaccgtaatgcggcaccgtcagacgttcggtattaatcactcgatcgccgtacagcataatatccagatccagcgtgcggggtccccagcgctcatctttacgcacacgtccctgattacgttcgatttcctgggtatgatcgagcaattgttctggaggtaacgccgtgtcgagagcgaccacggcgttaagaaaatcaggctgatcctgtggtccaaggggtttagtgcgataaagctgcgaacaggcgaccaaacgggtgcgcggaaggtgttccagcgcctccaaagcggttttaacctgttgcagcggttgtgcaaggttgctgcccaacgcgatataaacccggatcatagacctgttatgccccttctttacgttgggttggcttgcgcggacggcgcgagcgagaacggcgcggcgcagggtcggcacccaaagtattcaacatcgctttttgatgcggcggcgtagcttcctggaattcaccccaccactgagttaaacgctgtagttcatggttgttttccacttctgcacgcagagccagcaaatcgtaggccgcgcggaatttcggatgctccatcagtttgtgcgcccgtttgccctgacggcgagatagacgtaactgcaacagccaaatatcccgtaccagcgcagtaatgcgttttggaatggccagtgaacggcattcttcatccaaaatatcattcatcgccagcgcgaaggcatcgtaataagccagaccgctttcctgcgccagtttttgcgcatgttcgatcaatggataccaaagcatagctgcaaacagaaacgccgggttgacccgcttatcattttgcagacggtcatcggtattttttaatacctgaaccagaattcgctccattggcgaatcattatgctcagtaaaattacgggcaatcagcgggaataacggctggaaaagctgatattcacacagtttaagataagttttgtaaccgtagccggattgcagcagtttgagcgattcttcgaacagacgcgctggcggaatctcacgcagcagcgaagctaagcgcgggatcggctcggcggtttccgggctgatggtcatatccagcttggcggcaaaacgcacggcgcgcagcattcgtaccggatcttcacgatagcgaacttccggatcgccgatcaggcgaataatcccttgcttcagatcgcgcaggccgccggtgtaatcccgcagggcaaaatcggaaattccgtaatacaggctgttgatggtgaagtcacggcgctgtgcatcttcctcgatggatccaaagatgttgtcgcgcagcaacataccgttctgagcttgctgagaagaatttttatcattgccctcaggttgttgctgttcgtgatgaccgcggaaggtggccacttcgataatttccggcccgaacatcacgtgagccaaacggaaacggcggccaaccaaacggcagttacggaacagtttacgaacctgctcgggcgtcgcgctggtggtgatatcaaaatcttttggttttttgccaagcagtaagtcgcggacaccgccgccgaccagataggcttcatagcctgatttattcagacgatagagtaccttcagcgcattatcgctgatttctctgcgggaaatattgtgttgatcccgtgggattaccgtcatttgacgtttttcctcaggctgcaccgcttgtttgacgcggccggtatcagttctagcgggccttttttctttgcgggccactttatcttcaccggtaactttatcttcacggacagttttgtcttcgcggatcagtaccttacggcagaaattggctactcgggtaaaaatggtacacctcgatagtgactaataataaacagaactacggaaaaacagcggctaatcatagctcaccgaggttcctttgagaatgccgttatgttttctggctgagttattgcaccctgatggggaagtaaatccaggctccagtgttcaactgcccagcgtaataataacgatagatcaagatcttgccagctttctgccaccggttgacgcagaaatttcagtgcggcgactaaaattgggcgcggatcgccatcaggtagcggaggcgcgtgattctgcttagatagcttattaccgtcatgattcaacgccaatggcagatgaatataactcggcaccggcgcctgcaactggtgatacagcgcaatctgacgcaccgtaggctcgatcaaatcggctccgcgcacgatttctgtcacgccctgaaacgcatcgtctaccactaccgccagattgtaggcgaacagcccatcacgacggcgaatgataaaatcctcttcagccaacgcgggatcggcatggagcgatcccagcagtcgatcttgaaaaacgtaaaccggatgggtttggcgcagacggatagcggcgttatcgggcggtaaatgcaggttgcggcaatgaccgtcgtagaaaccgccaatttgctgaatgcggcgacgggtacaggtgcagtaatagcttaatccttgttggcgcagccaatcaagggcggcgcggtatgcatcgaggcgttgggattgatagataacctgaccgtcccagtggaggccataatggtctaaagtggtgaggatgcgaccagcagcgcccggaatttcccgaggcggatcaatatcttcaatacgaactaaccaacttccgccttgagcacgggcttgcaggtaacttccgagggccgcaatcagcgagccaaagtgtaaatctccggaaggagagggagcaaagcgccccacatagcgatgattttctgacataaatagagggaggttgctcccgttgtgttatgcggtgccagggaaagcccggcaccgtgttacacgttcttgctgaattagccagccatctgcttttcgcggatttcagccaaagttttacagtcaatgcataaatccgcagttggccgtgcttccaaacggcgaataccgatttctacaccacaagattcgcagaaaccgaaatcgtcatcttctacttttttcagcgttttctcgatcttcttaataagcttgcgctcacgatcgcggttacggagttcaagactgaattcctcttcttgagcagcgcggtcaaccgggtcagggaagttagcagcttcgtcttgcatatgagatacagtacgatctacttcatccctgagctgattgcgccatgcttcaagaatcagcttgaaatgcgaaagctgggcggcattcatatactcttcgcctggcttctcttggtacggctccaccccagcgatggcgagaatgctcaaggacgaggttttacgtttttgcccttcttgcatgatgcttctcctacattcatacgcactatcgaacgattccccaaagtacgggggaaaaatcaggccgctataaataacagatggaaggtaggttggcaattattcctgtcgcctgcttgacaatgctgtgaaggaaggcgtatttggcgagaccctatgcggcaatcggctttttattcagcagttggccactagtgactaaaccgttaataacggtatacgagcagcaagctcaataccgccaggcgatagttgaaaaccgtaacagataacttccaccccagacgcttgagcctgcgccagcaaatcggcataacgcgggtcaatatgtcgggacgctgcaacctgggtaatacccgaatgcaatacggcaaagaacaatactgcccggtgcccatcggcaacctcgttttttagctcccgcagatgcttctgaccccgtagcgtcaccgcgtcggggaaatatccgcactgttgttgcaataaggttacagacttcacttcaatatagcagttggatctattttctgcctgtaataacaagtcgatacggctattttccgcgccgtactttacctcagggtagacagcactgtaaccggataattctggtattgcatccagtgttattgcttcgtagactaactcattggcacgcatagtattaacgcagatccaatccccggtttgggtatgggtgagctcccaggtatggggatatttacgcttaagattgtccgaagtggaataccaaactgtgtcacccggtgttgcacatccggtcatggctccggtattggcgcagtgaatagtgagggtttcaccttcgggcgtcatcacatccgctagaaaacgcttataacgctgaatcagagtggcgtgttgcagcggggtcttaaatcgcatcttgtttcctttttttctcacccaatggccagctttgtatcactttatagcgagtacgcccacggctatagacggattcataaagcgagaactggctcggcgtaaattggccggcgtctactttgggcggcaggttgaccgggcgtgtggcatggcgaaacagcgtgacatgggggtgaaacggcatcgggttttggtagcaaccgctgcgtgccgcctgagatcgcagcaattctgctagctgtagcaatcctctgggggcttgtttacagccgagccataccacgccggaaccgggccagtggccgagatcgtccagagtcacggtaaaggccggctgctcgatacggccagccagttgccgaagcgcctgcgatttctgctcgctcacttctcccagaaaggccagcgtcaaatgcagattggcggcggcgatcgggcggccggtttcttcggggaaatgatcggctcgccactgaataatgtgctgttggcgcgatcgcggcagtgccaaagcgaaaaacaggcggcggctcggattatttgctaaatctgtcattaataaggtttcgcatcgttaaagcctggctaaatacggcgtaagggctagatgctacaatgcctgactgtgaaagttaaccttcgtggagtgtgctgtgtcttctttgcccgtcagtgctgttgttgacgatctattatctgcgttgcaatcttcgccgcaagtcttgcttcatgccccaactggcgcagggaagtccacttggctgccgctgcaaattctgcaacggggcgggttggcaggacgcattatcatgctggaacctcgtcggctggcggcaaaaaacgtagcttatcgtttggcgcagcaactgggggaggaaccggggcaaaccgtgggttatcgcatgcgtgccgaaagtaaaaccggcccgaatacccggctggaagtggttaccgaaggtattttgacccggatgttacaacaggacgctgagttgcaaggcgtgtcgctggtgattctggatgaattccatgagcgtagcctacaggcggatctggcactggcgctgctgttggacgtacagcaagcactgcgggaagatttgaagctgttaattatgtcagcaacgctggataaccaacggctttctgcgttattgcctgatgctccagcgatcgtttctgccgggcgcagtttcctggtagaacgcagctatcagccactatccagccatgagcgattagaggatggcgttgccaaccgggtgaaacgcttactgaaccaagaatctggttctctgctgctgtttttacccggagtgacggaaattcatcgggttatggaacgtttgagcggtgaagtggccgcagataccgatctttgtccgttgtacggcgcactgccgctgggcgagcagcaaaaggccattcagccagcggctacgggtcgccgcaaagtggtgttagccaccaatattgctgagaccagtttaaccatcgaaggcattcggctggtggtggatagcgggttggagcgggttgcgcgttttgatcctaaaaatggtctaacgagattattaactcatcgtattagtcaggcgtcaatgattcagcgggctgggcgagccggtcgattagaatccgggatttgctggcatctgtttgccaaagagcaggcggagcgagcgccggaatacgccgagccggaagtgctcagcagcgacttatgcagtttctggctggaactgctgcattgggggtgtcaggacgtttcccagctaaactggctggattgtccgcccgcgtctgctttatcggcggcacaggatctactgcggcgtttgggagccattgatgacaacggccagttgacgatgatggggcgatctatggcggcgttgggctgtgagccgcgtttagcggcgatgctgtgtgcggcggcgaagcatggcgaggacgcactggcgacagccgcgctgctggcagcaattattgaagaacccccacgcggcggccagatcgatttacatgattggctcagtcgccctcaggctcattggcagcgacgcgccagacaattacagcaacgtttgccgcagcgggcaggcagcgtcaatagcgatttggccggttggctattggcactggcctatccggaccgtattgcgcagcagcgtggccaggatgggcgttatctgctggctaacggtatgggcgcggcaatggcgcaggatgaagctttgtcgcgtgctccgtggctggtggcgatgagtttgttacaaaatgccagcgggccggacgcacgcatcttgctggcgctgccggttgatatcgatcaattggttaaacagtctccccactgcgtgacggaacaaacggcggtggaatgggatgaagaaaaagggactttgcgcgcctggcgccgctggcagattggccgcttaactctaaaagcccagccgttgagcaaacccagcgatgaggcgctacagcaggcattgctgaactgggtgcgtgagcaagggctaaatgtattgaattgggatgagaatgcccgccagcttcgcactcgcctacattgtgccgcgcgctggctgccggaggccgaatggcctgcggtggacgatcagagtttgctggacaatctggcgctgtggctacaaccctctctacagggtgttcgcgatttgcgcggtctgcggcaggttaatattgctgaagctttaacccgtttattaagctggcaacaacgtcagcggctggatagtgcgctgccaagtcattacactgtgcccacgggtagccgcctatctattcgttattatgatgataaaccgccgatattagcggtgcggctacaggaagtttttggtgaacaaagcagcccgcgccttgcagaagggcgggttgccgtggtgctggagctgttatctcccgctcaccgccctttacagattaccggtgatttggccgcgttctggcagggagcctatcgggaagtacaaaaagagatgaaagggcgttatcccaagcatgtctggccggacgatccggcgaataccttaccgacccggcgcaccaagaagtatcagcgctgattatttcagatgtttcctcttcccccgctctgaggtggaggggacattaagcggctatgccggccaatacgcgtggaagtagtggagaaaatgcatgtcagatgaccgcgagcctacggggcgcaaaggtaaaaaacctgcggccaaatccgcgttgaaacggcccttgggtcgccgacgtaatgaagatgattatgaagaagactatctggatgatgatgatcgcgacgatgatgactatgacgacgaggataaacccgtgccaagaaaggtaaaatcccgtcctgcgcgcaaaaagcgccgttggctcggcctattgatcaaactgtttatcgtggcggtggtattgctggcggtttacggcgtatatcttaactcgcaaatccgcagccgtattgatggcaaagtttggcaactgccagcagcggtttatggccgcatggttaaccttgagccgggcatggcttacagcaaaaaagaaatggttaatttgctggaaggaatgcaataccgtcaggtgagccgcatgacccgaccgggcgagtttacggtgcaaaacgacagtattgaaatgctgcgtcgaccgtttgatttcccggatggtaaagaagggcagatccgcgctcgtctagtattcaaaaacgatcgtctggcgcagattgtcaatctggataatcagcgagatttcggtttcttccgtctcgatcctaaattgatcactatgctgcaatcgccaaacggcgagcagcgcctgtttgtaccacgcgctggtttcccggatctgctggtagataccttgctggcaacggaagatcgtcatttctacgagcacgacggtatcagcccttattccatcgggcgtgcggtagtggctaacctgaccgcggggaaagcggtacagggcggtagtaccttgactcagcagttggtaaaaaacctgttcctgaccaacgagcgatctttgctgcgtaaagccaacgaagcctacatggcgctgttggtggactatcgctatagcaaagatcgtattctggagctgtatctgaacgaagtgtatctcggtcagagcggcagcgatcagattcgcggtttcccgctggctagcctgtattactttggtcgtccggtggacgaactgagtctggatcaacaggccatgctggtagggatggtgaaaggggcgtcgctgtacaacccgtggcgtaacccgaaactggcgctggaacgacgcaatctggtgctgaaactgctgcaaaatcaggggatcatcgatgttgagctgtataacatgctcagcgcccgtcctctgggcgtacagccgaaaggcggcgtcattacgccacagcctgcctttatgcagatggttcgtcaggagctacaggaaaaactcggcgacaaggtaaacgatctgtccggcgtgaagatctttactactctcgatccggtatcacaggacgccgctgagaaatccgtggaagacggcgttccggcgctgaaagcggcacgcaatatcaaagatctggaagcggcggtagtggtggtcgatcgctttaccggcgaaatccgggcaatggtcggcggcgcgcagccacagtttgccggtttcaaccgggctatgcaggcgcggcgtttgattggttctctggcgaaaccggcgacttacctcaccgccctgagtcagccggacaaatatcgcttgaatacttggctggcggatcaaccggtgtctatcaaattgccgaacggcaccagctggcagccgaagaactatgatcgccagttccgtgggcaagtgatgctaatggatgctttggtaaactcgctgaacgtaccgacggtgaatctggggatggcggttggtttggatcaaatcagcgccacgctacaacgcttgggcattcctaaatcggtcattaacccagttccggctatgctgctcggggctatcgatctgacgccaatagaagtggcgcaggagtatcagactattgccagcggcggtaaccgagccatgttgtcggcggtgcgctcggtgattgcggaagacggtaccgtgctgtatcagagcttcccgcaggcggagcgtatggttccggcacaggcggcttacctgacgttgtacaccatgcagcaaggggtacagcgcgggacttctcgatctctgtcagccaagtttgggaaatacaatctggcggcgaaaaccggtactaccaacgatttgcgcgatagctggtttgccggtatcgatggcaaagaggtagccattgtttgggttgggcgcgataacaatggtcccgccaagctgaccggggcgaacggggcgttaacgctgtatcgtcgctatctggaaaaccaaactccgctgccgttgatgctacaaccgccggaagggattagtcagatgagtattgattctgccggcaactttatttgtgacggtggcagctggcgcaccataccagtgtggaccgaaaacccgcagggcttgtgtcaggcagcggctgaaccgcagccacagaccgaaggtgacggcgtagccggttggatcaaagatatgttcgggcagtaacttcccgctaaactggcgcggcttcggtcgcgccaatcctttcctgattttccctcgtattatccctgacgtccgctcttttgatctggctcagagttatcccgccgctatccgtggatgatgctggcccctctgagagtgctcagcggtggcaggcaatgctgtttttccgttaatatcatcgctgattatcgtccgcccgcagatcttgcagtgggttggttattacgcataaactgattgctttgataattattatcgtttttattcattttctcatcgtgccgttataacagggcgctatgctaggtaatatgcaggatagacaggctaggcaatccagtaacttcactcttcgggaactgagtttttccgttcccggccgaacgctattacagccgttgtcgctgagttttccgcagggaaaagtatgcggattgattggccataacggttcgggcaaatccaccttgctaaaaatgctgggtcgccaccagttgccatccgccggtgaagtgctgctaaacgatattccgttgagtcagtgggataacaaagatttcgctcgcgaagtggcctatctgccgcagcaattgcccgctgcagaagggatgacggtgcgtgagctggtcgctattggccgctatccgtggcatggagcattggggcgttttcggccagaagatcgccaacaggtggaggacgctatcgcgctggtggatctcaagcctttggctaatcgattggtggacagcttatccggcggcgaacgtcagcgcgcctggttggcgatgatggtcgcgcaaaacagtcgctgtcttttgctggatgaacccacttccgcgctggatattgctcatcaggttgaagtactgagtttgatccaaggtttgagccacgagcgcggtctgacggtgattgcagtactgcatgatattaatatggccgctcgttactgtgattatctggtggcgctacgcggcggtgaaatgatcgcgcaaggagaatctgaatccctgatgcagggctcagtcttggagcaaatttacggcatcccgatgggaattctgccacatccagccggcggtgcgccggtaagttttgtctattaatgaatcgattttcctctgctgtacccgatagagaacgtcgccgtttgctgatagccctggcggtttcgccattgctttttgccctgccgggccgagctgcatcttatcctgatagcgacaagatcgtagcgttggagtggctgcccaccgagctgctaatggctcttggcgctacgccgctgggcgtggctgatattcataattatcgccaatgggtggaagaacctaagctacccgccagcgtgattgacgtgggtcagcgtaccgaaccgaatctggagttgttgcagcaactggctccctcactgattttactctctgaaggctatggccctacgccgcagaaactggcacctatcgcaccgagtatgagttttgcttttaacacgccgggtggctcgccgtttgcatcgggcagaaaatccgtgcgtgccttggggcaacgtttaggaatggagaaagcggcagagcgtcatctggccgaacttgacgcttttatcctcgccgcccgtgggcgattgcagggctataactcaggttcgttactgatgttttctttgctggatagccgccatgcgctggtgatagggcaaaatagcctgtttcaaggggttcttgacgagctcaacatcaaaaatgcctggcagggggaaaccaatctgtggggcagcaccatcgttggtatcgagcgtttggcacagattaatccggggaaagctatctgttttaaccacagtaacgaccagttgctaaaacaggtttccagtacgccgctatggcaatcaatgtcctttgtgcgccagcaacggttgcgggtactgccgccggtatggttctacggcgcaaccttatcggcgatgcgttttgttcgtttactggaacaagcgttggagcaaccttcatgagtgccgctttcctgcgttctcaacggttaatacctatagggctgatttctctgctgttggctttcggtgcggcgttaacgttgtataacctcaatcaattgctcccgtttaccgactggtctcaggcgctatggtcgcccaatatcgacgatgtgcgacaaatgctgttttattacagccagttgcctcgggtggctgtagcgttactggccggtgccggtttaggtctggtgggggtattgttccaacaagtattacgcaacccgttagctgaacctgccactttgggggtgtctgccggtgctcagttagggttgacggtggcaacgctatggatgctgcccggcggtgatttcacgcgtcaactggcggcgatggccggtggtgtgatcgtcggcttactggtatttggcgtggcttggggcaaacgaatgtccccgataacgctgattctagccggtttggttctggggctgtattgcagcgcgttgagtaacttactggcgttgtttaattacgatcaactacagggacttttcctgtggagcagtgggacgctgaatcagcaggattggagcgcggtgcagtttattctgcctcgcctgttacttgccgggctgttggcggctctgctgatacgtccgctgactttactggggctggatgatggcgtggctcgtaatctggggctaggcctgtcgctggctcgccttggtgcgttggggctggcgatcattttcagcgcgatgctggtcaatgccgtgggggttatcggttttattggcctgtttgctccgttgctggcgaaaatgctcggcgcgcggcgcttgtcgcagcggctgctgttggctcctttcatcggtgcgttattactgtgggtgaccgaccagattatggtttggctcacaccggtgtggcgtgaaattcccaccggtgccgcgacggcgttaatcggcgcgccgctgttgctatggctgttgccacgtttacacagtgtcacgccgccggcgatgaatattggcgataaagtgccggaagagcgccaaggtttactgagatgggctagcgccggcttattactgttactggcgggattggcggtggctctgctgtttggccgcgacggtcatggttggcagtggattggcggcgatcatctttcggcgctgttgcaatggcgctggccgcgggttctggctgctctggctgccggaatgatgctggcggtagccggtgcgttgatacaaaaactgaccggcaacccaatggctagcccggaagtgttaggtattagctctggcgcggcttttggcgtggtaattatgctctttattgtgccgggcaatgccttggtatggttgttacccgcaggtagtttgggtgcggcggtgaccttattcctgatttcgtttgtcgccgggcgcggcggtttttctcccggcagaatgctgctggcggggatcgcggtcagtactgcgtttaccacggtaatcaccatgctgctggccagtggcgatccgcgaatgcgtggtgtgctggcgtggatttccggctctacttataacgtcaccggttcacaggcattatctaccgccattatcgcgctggtgctgatggctttggctccgctatgccgtcgctggctgatgattttgccactgggcggtgtaacggcgcgagcggtaggaatggcactggctcctagccgcctggcgatattgctgctggccgccagcctgaccgccgccgccaccttaaccgtgggtccgttgagcttcgtcggcctgatggcgccgcatatggcgcggatgctgggcttccgtcgtgctattccacagttaatcattgcggccatcatcggcggcctgctgatggtgtttgccgattggttcgggcgtatgctgctgtttccttaccagattccggcgggtctgctggcaacctttattggcgcgccttacttcgtctatttgttacgtaaacagagcaattaagccttttatcaggcgcagagaagactcgtgctctgcgccaagtcctgccattttataggggtattataccctcaggaaattattctaacctgacgtaaattcaccgttgaaaactcggctaactcaccgtatttattcgtgattttctgtcgcgatcgcattttgaaaagcctgttaataatttatttgtgaatggaaattatttgtattagtgtttacgcgtttttacactccgtcataacttccttcgcggtacgctaatgaaaaataatcgtcagaagttgttcacagaaactgttgttatcgccacggcactgctgagtggcagtgcttatgccgccgctgagactaacgccgatactatggtgatctccgccagtcgcactaataaaaccgtggcgaatattgcccagaccacctggattatcgataaccagcagatctccgagcaggccggcggcggaaaagatatcaaagaaattctggcgcaattggtaccgggtatggacgtcagcagtcaagggcgtactaacttcggcatgaatatgcgtggccgcgaaatgatggtgctcatcgacggagtgaggatgaatacctcccgtgccggtagtcgtcagttggattctatcgatcccttcaatatagaacgcgtagaagtgctttccggcgccagcgcgctgtacggcggcggcagtattggcggtttggtcaatatcattaccaaaaaaggtaagccgggttccgagtttgaattcgcaaccggcgctaaaagcggtttcaataatagcgatgatatggataacaactttggcgcggcgtggagcggcggcaatgaacatattgacggacgcctttctgcttcttatcgtcggtttggcggcgggtacgatggcaaaggcgatcctatcaccatggacatcacccagaccggtttacagtattccgaccgtctggatctgatggccaatggcggtattaatctggatactaatcgccgtatcgaagtgctggcgcagtattacaaaagcgccggtgatggcgatcacgcgctgtatttagggaaggatttctccgttgtgaccggcaaaggcggaaacgcagaaaaccgcagcggtatgtattcggaccgcattcccggcacgcagcgtaacttgctgaatttcacttataccgataaagatttcttcggtcaggaattgttggctcaaacttattatcgtaacgaaaagctggatttccatcccttcccgcggctgagcgccaataaaacccaagtcgatagttattccacttcgcagcaaaatacccgtcaatacggtgcaacggtagccatgaccagtcaattgaccgacaggtggaatctgacttacggcgcggatattgatcgggaggagtttgatgctaatcagatgagcttcgatatggcgaaagccaatgccagtggcggcatgaatatgagcagcatttatcagattggccgctatccgggctacagcgtgactaatagcgcactgtttatgcaaacggactatgcgttaacggaaatgttcacgctgaacggcggtgtgcgctatcaatatgcgaaaaacaccatcaacgactttgtgggaaccactcagcaggaagccgttgcctctggtcaggctaaaagcgccgatgctattcccggcggcacaaccagctacgataatctgttattcaacgctggcgtattggcacatttgactgaaaatcagcaaatgtggctgaacttctctcaggcgttccaattgccagacatcggtaaatattacggtcagggcaactacgtcaaagtgggcgaccactatcagctaaaagacagcattaacgtagcggattctcgcctgcaagggattaaaaccaactcctatgagttaggctggcgctacctgggcgataacgtcacgacccaattggcggcctattacacgcagtcggataaatcgattaactacaataaatccacgttaaatattgatgtggtggatagcaaacgtcgtatttacgggattgaagggcaagttgattacagtctgccaatgccagaatggactaccggtgcctctttcaacctgattcgctctgaaaaccagacaaaaacgggctggagcaaagtgactatcactgaagccagcccgtcaaaactgaccgcttatgtaggctggacgccgggagactggaatttgcgagtacaaactcagcaggcgttcgacgtgaccgacggcgcgggaatgaaactggatggctacaatactgtggatatgttgggttcttacagtctgccggtgggcaaggtttctttctctatcgaaaatctgctggatacggaatacaccacgatttggggccaacgggcgcaggtcttctacagcccgctttatgggccggcctcgctgtatgatttcaaagggcgcggacgaacctttaatctcggttattctgtgactttctgatagcccgcagggaataaaaaaacccgcttaaaaggcgggtttttttacgtttaacgtcaggtgaacattacagcttggcgaaacagcggcgagcggcatccacggttttctgaatgtcttctgcgctgtgcgctacggacataaagccagcctcaaaggcggacggcgccagataaaccccttcttccagcatcagatggaagaagcgtttgaaacgttccacgtcgcaagccatgacgtcctgatagcaagtcactgatttagcgtcggtaaagaaaaagccgaacatgccgccaacgtggttaaccaccagcgggatattctcctcttttgccgcatgcagcaggcccgcggccagagtgtcggtcagctcggtcagagtttcatgtacgccaacctgcgatacttccgtcagacaggcataaccggcggccatggcaatcgggttaccggacaaagtccccgcctgataaaccgggccggtcggcgccagcgcttccatgatttcctgacggccaccaaaggcacccaccggcataccgccaccaatgattttacccagacaggtcagatccggctctacattgtaatagctttgcgcacctgccaatgccacgcggaaaccggtcatgacttcatcgataatcagcagtgcgccgaactcgtcacacagcgcgcgcaggcctggcatgaattctggcagcggcggtacgcagttcatattgccggcaaccggctcgacgatgatgcaggcaatgtcctgcggatattgttcgaaagcggcgcgaacggaggccaaatcgttgtaagtacaggtcagggtgtgcttggcgaaatcagccggaacgcccggagagttaggctgcccaagggtcagagcgccggaaccggctttaaccagaaggcaatcggcgtgaccgtgataacacccttcaaacttgatgattttgtcgcgatgagtatagccgcgcgccagacggatggcactcatggtagcctcagtaccggagttaaccatccgcaccatatccatggttggcaccagattggtgaccaactcagccattttcacttccatctctgttggagcgccgaagctcaggccgcgctcaactgcttcaatcaccgcattgcgcaccgccggatgattatggccgagcaccattggcccccaagaaccaacataatcgatataggctttgccatcgacgtcgaaaaggtaagcgccatcagcccgatggataaagagtggtacgccaccgacaccggtaaatgcacgcaccggagagttaaccccaccggggatcaactgttgcgcttgggcatacaaactttcggacttattcattaactggctcctgaattgggcttggcaaggaattaatccgttcattctaaagtactgacggcggttatcaaataattgggcatctttcgtgtaggaatgcgggctataaactgctttctcattaaggaagagagatcgccaattagcggcatcctgcgccagatcatgcgtcttcggattttatgcaggcgaatagatcggttgtgcgctaaaatctgcacaccgtctatttgtattacttattggttcaactgataaataacttcactatgactgattcaatgcaacaaacacctaacgttggcgccttacggattagacgtggccatttcattcgaaccctgattaatcgcgataaaacgccgattgttattttggtcatggcgggcgtggttggtgtcattaccggtttgctcggcgtcgctttcgatcgtggcgtcgattgggtccaacagcaacgctttgcggcgatagggcaggttgcagattacgccattttggtgtggccgctggctttcatcctatctgcagtgttggcaatggtcggttactttttggttcgccgctttgccccagaagccggtggctctggcattcctgaaatcgaaggcgcgctggaggaaatgcgcccggttcgctggtggcgggtgattccggtaaaatttatcggtggtctgggtactttgggcgctggcatggtgctggggcgtgaagggccaatggtgcagatggggggcaacaccgggcgaatggtggtggatattttccgactccgtagcccggaagcgagacattctttattggcaaccggcgccgcagccgggttatccgccgcgtttaatgcaccgctggcggggattctgtttgttatcgaagagatgcgctctcagttccgctacagcctggtttcgattaaggcggtatttgtcggcgtgattatgtcgaccattgtttaccgctattttaacggtgaaaaggcgctgatagacgttggccgtctcggcgatgcgccgttgaataccctttggctgtatctgacactgggggttttgtttggtgcggtgggtgtagcgttcaatgctttggtattccgtactcaggatatgtttatgcgtttccacggcggagactggcgtaaactgctgatgattggcgggctactgggcggtatgtgcgggctgctgggggtcattcaagctgaaaccgtcggcggcggcttctcgctaattcctatcgcggcagcgggaaattacaccatcggtatgctgctgtttatctttatcgctcgaacgatcaccactttgttgtgtttcggctctggtgcgccgggcggcattttcgcaccgatgctagcattgggcaccatgttaggtaccgcctttggtctatcttgcggccactttttcccagaatataatattgaagcagggacttttgctatcgctggaatgggggcattatttgccgcatccgtccgtgcgcccctgaccggcatcgttttggtgttggaaatgaccgataactaccaacttattttaccgatgatagtgacctgtctgggggcgacgctaattgcccaatttatgggcggtaagccattgtattctgccattttagcccgtaccttacagcgtcaggaacaggcggcagaagcggcaaaagccagtgaaacggcggttgaaacaggtaaataaaatatatcatttaccgtgaatacttgaacccattactcaggtattagataattgccacatagatcaggctgccattgtagtgacctgcaactcgaacaccggttgggagtacagagtatgagcgacgaaacagtattgcccctgcagtttaccgaggcagcggcaaaaaaagtaaaactgctgatttcagatgaagaaaatccgaatatgaaactgcgggtctacattaccggcggtggttgtagcggattccagtacggttttacgttcgacgaccagatcaatgacggcgatatgaccattgaaaaagaaggggttgagctggtggttgacccaatgagcctgcaatatctggtggggggcgcggtggattacaccgaaggtctggaaggctcacgttttatcgtgactaacccgaatgccaaatcaacctgcggctgcggttcttcctttagtatctgatagttatcgcatcgatttattaatagcgaaaaaaaccgcctgcctttcggtaagcggtttttttatgtccgacgttcatcactttcgattagcgctctctcgatcaccactctaacgtaatcaattgaacaggaatctgcacatcgtttgtgacctcagcattccgcagtgttacagcgtcagaacgcgtaattttgggggcataactggcgtcttttgggcaattgacctgcgggtttggcccgtcaggggtatgattggtctctggtgaaatctggcatgctgcgtacagcttcaggctgacaaagatactgccattctgactttttgccagtccgggcatagcgaatagcgctagccaggaagtaaaaaaaagtcgtttcataaaaaatttatagttcgttggccatcttttcgttcagacggaaagcacattgagtatcaggtatcggtctgctgcgaagaaacttggtggctgaaatctgaatataacttaatcagtgctatgggtcgtgataataaaagcaggttaggcaaaatcgtcgtaatgaaaaagtaatatgtcatcacagtatatgtttaattatcatggtgtaaaaacctgaaaaaacaaagtgataaattaacctaaaacgctacgcggaatactattttttatgacatgcctgcatttatcagccaaagattatagcgcaatcgtaatattaaagccctatataaataagcgttgtaatgtaactttatctcaagtgataggaggatattatgaacatagctttaactattggtacacgttcggttttagttagtgaaagtcgccttgaacgaatgatttcacaagataaagaccatgcaacgcagctgggattatgggataaaatcatggattatttccgcccagaaaaaaaacaggatgcaatgaatgaactttacaggttaacccatgctcatggcacatctgccagcataactctacgagatagggtagagatttttaataaaataaaattgatgtctgagccagtatatagagatttatttagagtagaggaccacccgaataaagataatattactttttttattggcgagcaggatatatatagtcaagaccgtcactctctactactagaagagcaacagtttctttcatattttaatatgaataaaatcaataccgaccaggatttgaaaatagatttcattgcagcaataaaaagatatatttctggtgatttaagagtgcagtggaataatggtggagctaaacagatttttaaagatatatgcagaggaacatataatgtagacgggtttagaatgtccgttactgataccattagctcagaagtaaaagaagctcatctgaaaaaatttattaataaattaacggaaaaacaggaagaggttttcaatatcgtgggatcgcaaattgggcaaattgcgctgattgataccttattatcctctaaaaaacagtttttttttcttgggaatccggacaagcaagctgagtttcgctttgatgcagagagtggtgagattgaagtcagccatcttattcagcagaatgtaagtcatgaacattttatggtgttacgtgaacattactttcaagaaaacgcgcattggtatgatggacttagtcttaaagccacttttactattgcgggggatggatctgtcgattgcactaacttccatttttacagtaaagaatatgatggaaacactgatagtcatcgttctgagtaatcggtcgaatatgcgtttaaaagccactgtatttatgtgagttgatatggtcaaagtgggaagagtattttctgccctttatgagccggggcaggggtagatattcggaactttaagaccgttactgcaaatggaagtcgtccagcatcaacgggagttttcgcgtgttctcgttaatgctgggctgaatggatattaatctattcaatctcaaaggtgggcaacttcaagcgccagcgaatggcagccagccggatagccagcgtgatcgccatacccagcatcatagcctgttgcagcggcataccaaaagtatggtaggccgtggcatgcgcaatgccgccaataatacaggcggtggcgtagatttcggtgcgtagaatcatcggtatttcccgcgccaatacatcgcgaatgattcctccgcccacgccggtaatcacgcccatacaaatcgccaccagcggactggctccggcggcaaaggctttattcacgccgatgcccacaaacaccgccaatccaatggcatccagcactggtagaatccactttggcgtccggcgcggttggcgaaccagcaaaatagtcgccagacaggtgatcatcgctaccaccaggtcggtgggatcttttacccaaaaaaccgggccattagccagcgccatatcgcgaatggttccgcctccgacagcggtcaccacgcccaagaccaatacgccaaaagggtccatccgtagcttgcccgccaagagtacgccggatatggcaaataccgccgtacctaaaatatccagccagtagaccagcatttgagattactccgcgacaggggatgaaatgctggccagttgctggcacagctgttgagcggcgagcaggatacgcgggctggcgcgattaaaccagtcttcattgacggcaataaccgggatatcgagctgcggctgccagaaggcgcgaaccgacttgatttgctcatcgccaccggcgataacgatagcctttggctggcggttaagtacctgttcacggctgatttgcggccagggtacgcggctatcggcaaaaatattttcgccgccgcacaacgcgacgacttcactttgtaaggtatggccggacgtggtgaacagcggctgggtgccaaattgcagcaataccttcagaggctgattttttccataatgttttgccagctctgctctgcgtagccgaatttgctgcgctgcctgatgggctttttgcggttcagggctgtatcccgccagtttatccagatcgtcggcgatctgctcaatagtggtgggatcggaataaaaaatgggaatcccgaatgatgccaactggtcgagcggacgttgggcattaccgccgcgccaggccagaatcagatctggcttaagcgccagtattttttcaacattaatcccttgccaggaagccacgtgctccaactttttggccgcttcaggatagtcggagtaatcgctgacggcgaccagcttatctcccaaaccggcggcgtaggccagttcggttgtgctaggagccagactgatgatccgttcggctcccaaggcgggtatcgtcattcccaggatcaaaaagccgcagaatatggctctgcggcagaatgtcggtattgagcctgatttcatacttacgcgcgctgggacagcattttgagcatagcttcaatcatcagcgtcgattgctgagcggctaccaccaagaactcatcgaagctcagatgagattctttatcggcaacgtcagaaatcgcgcgcaccactacaaatgggatattgaaggcgtgacaaacgtggccgatagcggcggcttccatttctacggcagctacgctcgggaaggttttacggatacgagccaaaggctctgcgccattgataaaggcatcgccgctgcaaatcagaccgcgtacagcattaagattcaattgcctgatgcaggtttcagccagttcgattagggcgttatctgcggtaaaggccgcggggcaaccggccatttggccagcttcatagccaaaggcggtgacgtccgcgtcgtggtaacgcacttcttcggaaaccacaatgtcacccacgttcagcgaggccgccagaccgccagcagagccggtattaatgatgacgtcaggctggcaatgttccagcaataatgtggtgcccattgccgcagagactttaccgatgccggatttcagcagggcaacctctactccatacaactggccggtgtagatctcacagcctgcgcgtgacaatgtctggcggttttcgatcttgtcgcgtagcagagtaacctcttgttccatcgcgccaataattcctactttcattttgaatactcgctaatttttaaaaggggataaccatgtttttctctgtcagtaggttatcattgtagtgagctacaggtaatgtgcaatggcgttgcgtcgcaggtgaatgaagggtgctaccgaaggtgcaaccgtcagggggaatgatgtccgggatcgactttaagcagaaaatcagttttcagcgtccgtttagtcaaacgattaccgctgaagatgaatatgacattgtgcgccagtttgagagcgatcgcgggcgcatcgtcaattcggcagctattcggcgtttacagcaaaagacccaggtttttccgttagaacgtaatgcggcggttcgcagtcgcttaacccactcgctagaggttcagcaggttgggcggcacattgctaaagaaatactgaatcgctttaaacaagataaacggatcgacgaattaggtctggataagctactcgatccttttgaaagtattgtagaaatggcctgcctgatgcatgacatcggcaacccaccctttggacattttggcgaatctgcaatcaataattggttttcccgccgtatggatcccgctagctgcggatcagagccgcaaacgcaggatcgctgcgaggttagttttctgcgattgtcagaaggacagcaggaattgaaccggctgcgcagccgtattcgacaggatctcagccattttgaaggtaatgcccaagctatacgtttggtttataccttgctgaagctcaatctgacttacgcgcaggttggctgtattttgaaatatacccgcccggcctattggtctgcgcccttgcctcccagccacagctatttgatgaaaaagcccggtttctatctggcggaagaagactatgttgagcggctgaggcgagaattgaatatgggagaattcgatcgcttcccgctgacttatattatggaagctgccgatgatatttcttactgtattgccgatctggaagatgcggtagaaaagagcatctttaccgtggagcagctatttgaacatttgaagaacgaatggggtgaggtcgtacccggtgatttgtttgataaaataattgggaatgcggctcgtaagattgaacgagttcaagggcgaagaagttcagaagatcaattctttatgtatttacgggtatataccgtcggtaaattggttcctcacgccgctcaacgatttattgataacttatctagcgtatttaatggaacctttaatcaggcgttattagaggattcaagtccagcctgcaaattattacagattttcaaatctgtagcggcaaaacatgtatttaatcatccggaagttgagcaactggagctacaaggctaccgggttatcagtggtttactggatatctacagcccgttactctctatgccgcaggcggctttcgcgcagttggtcgcggaggacagtcatcgcgactatccaattgaaacccgcctgtaccataaactttcgatcaagcaccgtttagcctatgttgaggcgatagaaggtgtgagtcatttatccgccgagctgcgagagattagggaatattattatcgggctagattgcttcaggattacatcagcggtatgaccgatctttatgcctatgatgaatatcgtcgtttgatggcggcagaataagtttctgctgccgttctattatttaatctttattaggtcgagttttgtaaagacggtaaacaatttttactattacagattcagtattaatgaacttaggctctgacgactactcttactttgcatgactcgattagttagtcaaaactattaattaacttgttatttgtatatagagagaaagagaaccgacccatgaaaaaaactacgttagtgttaagcgcattggcattaagcattggtttcgccatggggccggtctctgccattgctgcagaaaccgcctcatccagcacccagcagctccctagtctggcaccgatgctagaaaaggtcatgccatcggtggtcagcatcaacgtggaaggcagtgctacggtaaaaagtgccgggatgccagaccagttccaacagttcttcggcggaaactcgccgttatgtcaggatggttcgcctttccagggttcaccgctgtgtcagggcgggctgggcggtggcgatggtcagccaactcagaaagaattccgaggattaggcgctggcgtagtgattgatgctgcgaaaggctatgtggtgaccaataaccacgtagtagaaaacgcgaataaaattcaggtgcagttgagcgatgggcgtaaattcgacgccaaagtgatcggtaaagatccacgcaccgatattgccttgatccagttgaaagactttaaaaatctaacggcgatcaaaatggccgattccgatcaactgcgggtgggcgactataccgtggcgatcggtaacccttatggattaggggaaacggcgacgtccggtatcgtttcggcgttagggcgcagtggcctgaacgttgaaaactacgaaaactttatccagaccgatgctgcaattaatcgtggtaactccggcggcgctctggtgaacctgaatggtgaactgatcgggattaacactgctattctggctccggacggtggcaatatcggtattggttttgctatcccaagtaatatggtgaaaaacctgacgtcgcaaatggtggagtttggccaggtgaaacgcggcgaactggggattatgggaaccgaactgaactccgaattggctaaagccatgaacgtggacgcgcagaaaggtgcctttatcagtcaggtattgccgaagtcttcagcggcaaaagccggtattaaagccggtgatgtgattgtgaccatgaacggaaaagccatctccagcttcgccgccttccgcgctgagattggcacactgccggtggggagcaaaatagtgctgggcctgctgcgggaaggtaaaccgattactgtcgatgtcacgttggagcagggttctcaggcgcagatcgcgtctggcaacatttacacagggattgaaggcgctgaactgagcaactttgatgccgcaggtaagaaaggcgtgaaggtagatagcgtgaaagaaggttctgccgccgcgcgtatcggcctgaaaaaaggcgatattattaccggtgtaaaccagaaaccgacgctaaatctcggtgagttacgtaaaattctcgaggctaagccttcagtgctggctttgagtattcatcgtggtgataccgatatttatctgttagcacagtaattatccgcgattcggggccagaatatttcggccccgaattttacctatccccgcttaattttcctttgattcaggcgacggcggttggcctatatggcttttcgcagcctgaatgacattctctatttcatcgagtaattccagccattctggcaataaatcctgattgtcagccttctgccgtagctgttgctcaatataggaacacagccgttttagtctcgggacgccgctgcacgcgcagctaccgtgcaatttatgaatcagattcacgatatcctcgtcgtctgcgccttccacaatggcgttgacccgctgtgtgacctgtgggagaaacgctaatagcatgaccaacagctcctgcgccaaatcttctttattggcggcctgacgaatagctagcggccagttaatcgaatcttcccagcctgcaggccgcggggtcattaccgtagcagacttctgaacggtcgtttgttcatgctggtaaaaacgcgccagcgcctgcgtcagccgggtttcatcaataggtttagccagataatcagccataccaagcttgagaaactgctcctgttggccactaatggcgtgggcggtaacggcaattattggcgtattaacatgattaggtaattgatgaattaactcactggcgcgaataccgtccacttccggcatctgaatatccatcaaaatcacgtccagagcatgttcgcgggcgacggcaatggctttttcagcgctttcacacagaatggtttcttcaacctgttcttccagcagtgtgcctatcagttttagattcgcaggattgtcatccaccgccattacacgcagcggcaggcgcggctttttcggttcgttttcgtttggcgcgggcaatgctcgcggatcttctttcaacaacagtggcatcaggcgattgctggaaatcggtttcaccagacaggctttggcacctaactgttttaactgctctgcatcaacctgagactggcttggcaacgccagaatcacatgatcggcaatttttagcgccgctaacagcttatcctgatgacctgccatattcgtgcggaaaggaatcggaacgccgactagcaggaaatcgtagtatttatccgggagttgggccagcgtcgggctgtgagtcacccgcagaggcgtaatgctcaacatatccaacgtggcctgagctgccgccggattccgttcgatataggctaaatgcttgccggcgagctgttccatggttggctggcgatagaccatgccttcgttgagatctaaagtgatatggaaacggaaagttgagccacgatttaactcgctacggaagctaatatcgccgtccatttctttgaccagacgctcggttattaccaagccaagcccggtaccaccgtggcggcgggaaatgctggcatcggcctggcggaaagcttgaaacagctgagactgctgctgttcggaaataccgatgccggtgtcctgaatctccaccgccagcttaatttgtcgggcggtttgcgatagcagacttacgtggatatctacgttaccattttcggtaaacttgatggcattgcccagcaggttggtcatgacctgctgcaagcgcatagagtcgcctaccacctgttctggcacatcattattgacgtgcagcgtcagttccagccctttctcatgtgcggtgtgagccagcaaaataacgacttcatccaaggtttcacgcagcgggaatggaatatgctccaacaccagcttttcggcctctagcttggagaaatccagtacgtcattgatgatacacagcagattattggccgagcgctggatggtttgcaggtaatctgtttgagttggcgtcagggaggttttcagcgtctggcgggtgaatccgattacgccattaagcggcgtgcgtaattcgtgggacatattggccagaaactcggatttaattcgcgccgcttcctgcgcccgtttcttcgccagacccagttccacgttctggatttccatctgttccagcgtttcccgcagatctgaagtggcctgatcgatattctgctgcatttcctcgtggtaggccgccagcgacatcgccatcgagttaatgccgtttttcaggatattcaattctcccagcatgtgtccttctacccgactatccaactggccgcgccgaatccggtctacggtattcaccatattacggatagggccggtcacatcgcgcatcagacgataggcaaacaaaatggcaatacacaggcagaacaacagcaataaagtagagataaacacttctttatattgctgaagtcgtacggattgtaaatctagatcgatggcaatataacccaacggacggttgctaatattggcttctggtggccggtcactggagatattatattccgagacaatgggcattcttaagattaacgaatcccctcggtaggtcagcatcaaagaactggggatcggaatattattcgtcaaccttaattgtgacgagttgtaattatagttagaagtgacaaaaagattattatctgcgtcaaaaacggtaattgaacgcacaatatttgaatggcggcgatgtaacagattaattaactgtctgacggtatctcgattacggaacgtcattccatattcactggcaaccgccagcggttcgataatactggttcctgcgttaactacttggttttgcagttcattatatcgatgcaccataaaagatgtactgagtaatagcccaagcagaagcgtgggagctaagattagtatcatcatgcgcgcgcgaagactgtatttggtcatggtattccaatgtgggagaattagcagcttacgaaaaccaacgcatactcatcaataattatggcgcaattctactctccaaaccgccgtgttacgacccggcaaatgataaccgtgactgctgacgacctggatcctttagggcagggcgttgcacattatcaaggtaaggccatttttgtccccggtatgctacccggagagcaggccgagatacagttaactgaagaaaaacgtcagttttcccgcggaaagcttcagcgtttactgaagccctgcgccgagagagtcgcccccctttgcccacattttgggacctgcggcggctgccagcagcaacatgccgatacccacttacagcagaacagcaaggcggctcacctgcaacgcctaattgcgcgagaaacaggcgtaaccgtagagccagagtctgtcatctgcgggactgaatacggttatcgacggcgagcgcgtttagggttgtactaccaacctaaacagcagcgtttggtcatgggttttcgcaaggtcgcttcccacgatttggtggcgataaaaacctgcccggtactgcgaccagagctcgagcgcctgttagcgccgctttatcgctgtttgtcagaattgcgtgccgttaaacgcctgggacacgtagaattggtgctggccgataatgggccgttgctgacgctacgtcatcttgatagcttgagtaccgccgatcgcgccgcgttactggctttttctcagcgtgagcaggtcgcgatttatctggctcccgacagcgatcatattgagcgtttaagcggcgaggagccttactatcagatagaaggtctacgcttagcgtttaatccgcgcgattttattcaggtcaatgccacggtaaatgagaaaatggtggcgcaggcgctggaatggttggatgtgcaaccgaatgagcgcgttttggatttattctgcggtatgggtaattttactttgccgttagcgcgtcatgccctacaagttgtgggtatagaaggagttgcgacactggtggctaatgggcaatataatgcgcagattaatggtttagctaatgtttcgttctttcatgagaatttagaggacgagatcgataaacagccttgggcgagccaaggttttgataaaatattgctggacccggcgcgggcaggtgcggccggggtcatgttacatatagtgaagctggcgccgaaacgggtggtatacgtgtcttgtaatcccaccaccttggcacgagatagccacgtgctgatcgacgccggttaccgtcttgcacgtgtgcgaatgttagatatgtttccgcacacggggcatcttgagtcaatggcgctgtttatacagcaggagccactggccgctgagtagggagaagttatggttgcggtaagaagtgcacatttgaatccagcgggcgagtttgctctcgacgattggatcgccagcttgggtcttcccaacccgcagtcatgtgagcgattagccgaaacctggcgttattgtgaacaacatacacaaggtcatcccgatgcctcgctactgctgtggcgcggccttgaaatggttgaaatcctttccaccctgagtatggataacgacagtatgcgcgcggcgctgctgttcccattggttgatgccaatgtggttaacgaagaaaccctgaccgaacagtttggcaaaggcattacctatctggtgcacggcgtgcgggatatggatgccattcgccagctaaaggccaccactaatgattcgatgagttcagagcaggtggataatgtccgccgtatgttactggcaatggtggaagatttccgctgtgtggtcattaaactggcggaacgtatcgctcatctacgggaagttaaagacgcaccggaagatgaacgcgtgctggcggccaaggaatgttccaatatctatgcgcctttggctaaccgcttgggtattggccagattaaatgggagctggaagatttctgtttccgttatctgcatcctgatgaatacaaacagatcgccaagttgcttcacgagcgccgcatcgatcgcgaacagtttatcgacgattttgtcgcttctttacgtcaggccatggccgatgaaggaatcaaagcggatatttatggccgccctaaacatatctacagtatctggcgcaaaatgcagaagaagtcgctggcgttcgatgagctgtttgacgttcgcgcggtgcgggtggtggttgagcgtttgcaggattgctatgccgcattaggtattgtgcatactcatttccgtcatttgccagatgaattcgacgactacgtagccaaccctaagcctaatggttatcagtcgatccacaccgtggtgcttggcccgcgtggaaaaacgctggagattcagattcgaacccgccagatgcatgaagatgcggaactgggtgtcgccgctcactggaaatacaaagaaggggcggttgcggcagggcgctcaggctacgaagggcgtattgcctggctgcgcaaactgatcgcgtggcaggaagaaatggccgattctggcgagatgttggatgaagttcgtagccaagtgttcgacgatcgggtgtatgtgtttacgccaaaaggcgatgtaattgatttgccagccggctctacgccgctggattttgcctatcatatccacagcgacgtgggtcaccgttgtatcggagccaagatcggcgggcgcattgtgccctttacctatcagctgcaaatgggcgatcagatcgaaattatcacccagaagcagccgaatccaagccgtgactggttgaacccgaacctcggttatgtcaccaccagccgcggtcgttccaaaattcataactggttccggaaacaggatcgcgataaaaatatcctggctggccgtcagatgctggacgacgaactggaacatatggatatcagcctgaaagaggccgaaaagctgctggttccacgctataacatgaattcgctggatgaagtgttagcggccattggtggcggtgatattcgtctcaatcagatggtgaacttcctgcaagggaagcttaacaaacctacggcggaagaagccgatctggaggcgttacgccatctgaccaacaaaacccagcagccgtcccgcaatagcagtaaagacagcggtcgcatcgtggtggaaggcgtcggtaatctgatgcatcacatcgcacgttgctgtcagccgattccgggtgatgaaatcgttggttttattactcaaggacgggggatttccattcaccgcgccgattgtgaacaactgctggatctgcaatctcacgcgccggaacgcattgttgatgcggtgtggggagaaagctattccagcgggtattcgctggtggttcgggtcacagccaacgatcgcagcggcttattacgggacatcaccacgattttggctaacgaaaaagtcaacgtattgggcgtcgccagccgtagtgataccaaaaagatgctggctaccatcgatatggatattgaaatctataacttacaggtattaggtcgggtgttagctaagctcaatcagttgccggatgtgatcgatgcccgccgcttgcacggcaattaaattaacgaggatatccgcgagtgggcgatctgggctaggctttgcccttttagctctgaccagtgttcgacttttgagccgagcgctggttaacatcaattctactgcgcacattacatcttgattatcataaataaaagtgaaaaaaccgctatgacgcctactgaaaccgccgctgattccaccgcttcggccttacaacgtctgttggatatcatgcgcgcgttgcgtgacccggaaaacggctgcccgtgggaccgtaagcagactttcgataccatcgcgccttacacgctggaagaaacctacgaggtgcttgacgcgattcagcggcaggattatcccgacctgcgtgatgaactgggcgatttgctgttccaggtggttttttatgcccaaatggggcaagaacaggggttatttgccttcgatgatatttgcaacgccatcagcgacaaactggtgcgccgccatcctcacgttttccctgtttcgggtcaatcggccgaggtgatggatagcgcagaaattattgccggttgggagcaacgcaaagccggggaacgggctgataaggcgctgtactcggcgttggatgatattccagacgctttaccggcgttgatgaaggcgcataaaatccagaaacgctgtgccgccgttggttttgattgggatacgcttggcccggtgctggacaaagtatacgaagaaatcgacgaagtgatgtttgaagcgaaacaggcggtggtggacgaggagaaactgggagaggaaatcggcgatttgctatttgcgacggtgaatctgtcccgccatttgggccataaagccgaaaatgctttgcaggcggcaaaccgtaaattcgagcgacgctttcgtcaggtagaacagatagttaccgcctctggccgcaagatggaagatgcctctttagccgaaatggaagccgcatggcagcaggttaaaaagcaagaaactgaaatctaacgtgttttaattcatttgatggatggttgttgaatttcaattacgttaatatattgaattataacggataggaagacggtgttcagcgcgcttttcatgagtaaaactctgcgaggcgttgagatcatttgtagcgaaaccaaggttcgagtatactactttcccgtcttggttcttccatcgtctttaaacctaaactctcaggttcagcatgacaactaattatatttttgtgaccggcggggtcgtatcctctctgggtaaaggcattgccgcagcctccttggcggctattcttgaagcccgtggcctcaacgttaccatcatgaaactggacccgtatatcaacgtggatccgggcaccatgagcccgacacaacacggggaagttttcgtcaccgaagatggtgctgaaaccgatctggatttagggcactacgagcgcttcattcgcaccaaaatgacccgccgcaataacttcaccactggccgcatttactcagaagtgctgcgtaaagagcgtcgtggcgattatctgggtgcaactatccaggttattcctcatattaccaacgctatcaaagaacgtatcatcgaaggcggcgaaggccacgacgtggtattggtcgaaattggtggcaccgtaggtgatattgaatctctgccgttcttggaagcgattcgtcagatggcggtagatgttggccgcgagcatactttgtatatgcacctgacgctggttccttacctggctgcggctggcgaagtgaaaactaagccaacacaacattcggttaaagagctgctttccatcggtattcagcctgatgtgctgatttgtcgttccgatcgcgcagttcctgctaacgaacgggcgaaaatcgctctgttctgtaacgtgccagaaaaagctgttatctctcttaaagacgttgattccatttataaaatcccaggcctcttgaaatcacagggccttgacgattatatttgtaaacgattcagcttaacttgtcctgaagcaaatcttgccgagtgggaacaggtaatatatgaagagtccaatccgggtggcgaagtgaccatcgggatgatcggcaaatacgttgagctgccggatgcctacaaatccgtgatcgaagccttgaaacacggcgggttgaaaaaccgtctgaccgttaacatcaagctgatcgattcacaggacgtagaaacccgcggcgaagaaatgctgaaagggctggatgctattctaatcccaggtggcttcggctatcgcggtgtagaaggcaaggtgactgcggcgcgttatgcccgtgaacacaatattccttacctgggcatttgcctgggtatgcaagttgcactgatggagtttgcccgtaatgtcgcgggtatgcagaacgccaactccacggaatttgtgccagactgtaagtacccggtggttgcattgatcaccgaatggcgtgatgaagacggcaacgttgaagtacgtacggaagaaagcgatttgggcggtaccatgcgtgtgggtgggcagcaatgcaaccttaccgatggtagcctggtacgtcagatgtatggcgaacccaccatcgttgaacgccatcgtcatcgctatgaagtaaacaacatgttgttgaagcagattgaagctgccggtctacgcgtagccgggcgctctgctgataacaagctggtggaaatcatcgagttgcctaaccatccttggtttgtcgcttgtcagttccatccagaatttacttcgacgccacgtgatggtcacccgttgttcgccggctttgtgaaagcggctggtgagtatcagaagcgccaggtgaaataaaatatttggtaggtggggcggcttgaatgtcgccccatctgtctggagttttagtttaacttgtactgaggaaaatctaatgtccaaaatcgttaaagtcatcggtcgcgaaatcatcgactcccgtggtaacccaactgtagaagctgaagtccatctggaaggcggtttcgttggtttggctgctgcaccatcaggtgcttctaccggttcccgtgaagcactggaactgcgtgacggtgacaagtcccgtttcctgggcaaaggcgttctgaaagctgttgccgctgttaatggcccgattgctcaggctgttatcggtaaagatgccaaagaccaggctaacatcgataaaatcatgatcgatctggacggtaccgaaaacaaatcgaaattcggtgcaaacgcaattctggctgtttctctggctgctgccaaagcggctgctgcgtctaaaggcatgcctttgtacgagcacatcgctgaactgaacggcaccccaggccaattctctatgccactgcctatgatgaatatcatcaacggcggcgagcacgcagacaacaacgttgatattcaagagtttatgattcagcctgttggcgctaaaactctgaaagaagcggttcgtatcggttctgaagtgttccacaacctggctaaagttctgaaagctaaaggtctgaacactgctgttggtgacgaaggtggctacgcgccaaacctggaatccaacgctgctgcactggctgcaatcaaagaagccgtagaacaagcgggttacgtgctgggtaaagacattactctggctatggactgtgcagcttctgagttctacaacaaagaaaccggtatgtatgagctgaaaggcgaaggcaaaaccttcacttctcaagagttcactcattacctggaaggtctggctaaacaatatccaatcgtttctatcgaagacggtctggacgagtctgactgggatggtttcaaataccagaccgaagtgctgggcgacaaactgcaactggttggtgatgacctgttcgtaaccaacaccaagatcctgaaagaaggtatcgaaaaaggtgttgctaactctatcctgatcaaattcaaccagatcggttctctgaccgaaactctggctgcaatcaagatggcgaaagacgcaggctacaccgcggtgatctctcaccgttctggtgaaaccgaagatgcaaccatcgcagatctggctgttggtaccgctgccggtcaaatcaaaacgggttctatgagccgttctgaccgcgttgctaaatacaaccaactgatccgtatcgaagaagcgctgggcgaccgcgcagtattcaacggtctgaaagaagttaaaggtcagtaatttctgccctgatacttaccagaaaaaacccgcttcggcgggtttttttatatctaaagttaatgaaatagaaactattattttttatttatatggttatacagggaataaatgagatctatcggtgattaattgaattgaaacctgttattcaattcaaaattaacatttcaacaagtcatatcaatttatatcttaattaaggttgtttttttatataaaaacaaaataagctggttcataatctgctttgaatactacactgaagtataaatatagtaataatattattactatttggtttgactagccggatcgctaaatatttaactgctgattacgctttttctaaaagccattattacctgtttgaggttctgtatccatgaaatatagagttgttatcgtcggtggtggtaccggggagacaatccttgcgattttgttggcaggtaaactgcaaagggatattgtttcaaagaaagtcgaacttatcttactgtctgattctctcatgcattattataaacctgcgtttatgtatgtagcatttaatttatttcttaaacaggaattagagagaccacaaaaaatcctattgagaccagaaatagtatttattatagataggtccgaagggtttgatttaaataaattatctttacccgcaaaggtgaaaaatacggttatgattttttagtttttgcgtccggctgcgtacctcgacttgaatgaatagaggggttggtagaaagtggcgatcatttttatccgtatgaagcgtccggcctgttagctaaaaagctagccaaaatagaaaagggcgaatttttatcatcgtctctttcccagagacatctaacgttcaccacccgtgcggagttgctccactagaaatgacgttaatgccagatgactatttacgacagcggggagcgggtagtgcgatagaaattatttatacctatccgagggtagcgcagctattgcgtaactgtctctttttacagcgtcctagcggagatattttacctaacgtctttgctgccagagatattaaatatcagagaggcttcacactgagcaaagtcgatccgaataaaaaattgcctattccgcagaaggcgaggctcaacccttcgatattttgatggcgactccacctattagcgctgttgatgcggtgcgaaattcggggctgagtgaatgggataacaaaggaggcgggttgccaaccgacccacaaacgctccaggtttatgggcagcagggcgtttatgttatcggtgataccgtttctccctatccgtaaagcgggtggtgcctgccataaccaggctcctatagttgcagataatagttgcagataatattttttccgaaatgatattgggttatcccgcgcgtgactacgataggaaagtacaggctatcgcccaaatggggctgaatgccggaatgccgctttgttatggctatcggaatgatctcttgcccaggctaccgacaaaggtaggcgtttgctacgcagcggctttaaccgcggtctttattgggcaatggtgcgtggcttaatataaatattaggagaaatactcgcgccaaagcgcgaaaccttgagatatatgctctgtgaaggcaaagttatcaatgataaattcgggctctcatgagggtgggtttttataatgatgagctgatatagcgatgaattctataataaaggattttacaacaaagagtttttataacaaaaagtcgttgggttctagcatattgattccgtttatctctcatggtgatattttctatgaactcttgcctgccagtaaatggcgttgcttaagagtttggctaatcagaatcaataagtatttaatcactatcaatcaatattaaggaaaagaaagatatgaagctaagcaccttcttgttaccccttatattttgctctggcgcagctttggcagcggatttgaccgtgactatgaatgaatcattaccgcagggaaatggccgggcgcttggcaagatagtcgtaacggaaacgccctatggactgctatttagccctcagttagctggattgacaccgggcattcatggtttccacctgcatgaaaatgccagttgcgcgtccgcagaaaaggacggaaaaatggtacccgcgttagcggcgggcgggcatttcgatccgaaaaaaacttcagcgcatctggggccttatagtgataaaggacatttgggggatttgcctggattggtcgttaacgccgatggttcagccaactatcaagtcttggctccacgcctaaaatccttatcggaacttaaacatcacgccctaatgattcatgccggcggcgataactatgccgatcatcctatgccgttgggcggtggcggagcgagaatggcctgcggtgtgattgagtaaccccctgatacaaagaaagctggccgccagcaggcggtcggtttggtgacagcgtcagaatctgcgataatcccccattacccgctttcatatagagatactgatgctgtacccgattaatgagatgttccagactttgcaaggtgagggctttttcaccggcgtaccggcgatatttgtccgtttacaaggctgcccggtagggtgcagctggtgtgacaccaaacatacctgggagaaaaacgtcgatcgggaagtcgatgtgcagcgtattttggtgaaaaccgaggaaagcgacgcttggggcaacgccagcgaacaacagttattaacccttcttcgccaacaaggctatacggcgcgccacgtggtaattaccggcggtgaaccttgtatttacgatttattgccgctaaccactctgctagagcaggaaggctttagctgtcagatcgaaaccagtggcacttatgaagtccaatgctcggaaaaaacctgggttaccgtttcacctaaagtgaatatgcgcggcgggttaaaagtattagaacaggctttaactcgggcagatgaagtgaagcacccggttgggcgaatgagagatattgaagcgttggaggcattattggccacgttgcacgataataaacaacgaattatcgcgctacagccgatcagtcagaaagaagaggccacgcgactttgtattgaaacctgtatcgcccgcaattggcgattatctatgcagacccacaaatatttaaatattgcctgatagtgagaggcgcagggctgagggatgctctccagccctgacctagccagattaaccgcggtagacgcagcctgcggagcaggtttcttttaccatgactgcgctcagctccggtaattgcggtttcaactgctgccaaatccaagccgctaaaacttcactggttgggttctccaaaccggggatatcgtttagataatgatgatccaaacgctcccaaataggctgaaaagctgctttcagctcggcgaaatccataacccaaccgctatgagcatcaacttccccggtcacttccaggcgaaccataaatgaatggccgtgcaaacgaccacatttgtggccttctgccacgttaggtaaccggtgtgcggcttcaaactgaaaatctttaaataatgtggtgctcatcatcctggccttattgactcaaaaaccgccgcatagtaccggaaactgggcgcgcaagctacgtttgccggtcttggtgcgccatccgatttactataataactataatttagcagcctatgcttttgatttaaaaccttccgcttggtcgattattggattttcggatcacagaaatttttcctaataagttgaacactttgactcgtatgtcatagcgaaaaaaccgcttagttgttttagttattaattatttctatcacttctttaattgttattatccggatggttaaccttacaaacctaaagatttatttgccgacaagatatcggactgacactggctaaagcacaagggaattcgtaccgcgatgacgactcaggctcctccaacttcattactcccgctttcgccggagcaactggcccgcttacaggcggcggtcggcgagttttcgccaacgcaaatggcgtggctgtccgggtatttttggggcatggtcaatcaacagccgaacgtgcctgctcatggggttgcagagccggaaacgccgtgtattactctgatttctgcgtctcaaaccggtaatgcgcgtcgtttggccgaacagttgcgtgacgatctgttggcagcaaaactaaaggttaatctggttaatgcgggcgactacaagtttaaacagattgctcaggagcgcctgttagtcattgtcgcctcgactcaaggagaaggtgagcccgcggaagaagcggtagcgctgcacaaatttctgctatccaaaaaggcgcctaaactgacggaaaccgcgtttgcggtctttggattgggcgatacctcttacgagtatttctgcaaggcgggtaaggattttgatacgcgtctggccgaattaggcgcagaacgtttgttggaacgtgtggatgccgatgtggaatatcaggcgcaggctgaacagtggcggcagcaggtggtgactgttttacaagctcgcgctccggcacaatctgccagcgcagcggcgcagacgctaagcggtgctgtggatgaaatgaccagcagcccgtatagcaaaactacgccacttaccgcacagttggcgatgaaccagaaaatcaccgggcgagattcggaaaaagacgtacgccatatagaaatagatttaggtgaatccggtttgcgctaccagccgggggacgcactgggcgtgtggtatgaaaacgatccggcgttggtggacgagctagtcgagttactgtggctaaaaggcgatgagccggtcacggtggaggggcaaactttgccactgccactggcgcaggcgctgcgcttgcactttgaactgacgcaaaataccacggtgattgttgataaatatgccgcgctttctcgcgatgagaaactgattgctctgttggcggataaaagcaagttacagcattacgctcatagcacgccgatcgtcgatatggtgcgtcaggcaccggcggatctgaacgccgatcagctgattgctttgttacgtccactcaccccacgtttgtattccatagcttcatctcaggcggaaaatgaaaccgaagtgcatatcaccgttggagtcgtgcgctatgacatcgatggtcgtccacgcagcggcggtgcgtctggcttcctggccgatcgcttggaaatcgatggcgatattcgggtctttatcgaacataacgataatttccgtttgcccgctaacccagaaacgccagtcattatgattgggccgggcaccggtatcgcgcctttccgcgcatttatgcaacagcgcgatgccgaaggtgccagtgggaaaaactggttgttctttggcaatccacactttaccgatgattttctctatcaggtcgagtggcagcgttatgtcaaagaaggtttgcttacccatatcgatctggcctggtcgcgggatcaatcggaaaaaatatacgtacaagacaaactgcgcgaaaaaggtgcagaactgtggcgctggatacaacaaggtgctcatatttacgtctgcggcgatgccaatcgcatggctaaagacgtcgagaaaactttactggacgtggtggctgagcacggtgcgatggatgccgagcaagctgacgaatttttaagtgagctgcgctttgcgcgccgttatcagcgagatgtgtactgatgaatgataaacaccctggaccattggttgtgactggtcaattgtctgacggcgagcggatgaaatcccagagcaattacctgcgtggcactattgccgaggatttacataacggtctgaccggtggtttttccggcgataacttcctgttaattcgttttcatggaatgtatcagcaggatgatcgtgatattcgcgctgagcgagcggagcaaaaattggaacctcgccatgccatgatgctacgttgccgcctgccgggggggattatcacgccacagcaatggctgggcattgataaattcgcgacggacaacacgctgtacggcagcattcgtattaccaaccgtcagacttttcagtttcacggtattctgaaaggaaacgttaaaccggctcatcagctattgaatcagttaggtttagatgcattggcgacggccaacgatgtaaaccgcaacgtactctgtacctctaatccggtagagtctgaactgcatcaggaggcctacgagtgggcgaaaaggatttccgagcatttattgccacgtactcgagcctacgccgagatttggctggatgcggagaaagtggcaaccaccgatgaagagccgattctgggtgcaacttatttgccgagaaaatttaaaaccacggtagttattcctccgcaaaatgatgttgatttgcatgctaacgatttgaacttcgttgcggtggcggataaaggtaaattaatcggttttaacgtgttggttggtggcggactgtccattgcgcacggtgataaaaatacttacccacgtaaagccagcgattttggttttatcccgttggcgcacacgctggcggtagctgaagccgtggtaaccacccagcgggattgggggaatcgtaccgatcgtaaaaatgcgaaaaccaaatatacgctagagcgcgtcggcgtggatgtgtttaaggcagaagtggaaaaacgcgctggaattagctttgcaccgaccaaaccctatgaatttacgggtcggggcgatcgcatcggctgggtgaaaggcattgataaaaagtggcatttgacgctgtttattgagaatggtcgcctgctggattatccagatcgtagcctgaaaaccggcgtggctgagatcgctaaaattcatcagggagattttcgcttaaccgctaatcaaaacctgattgtagcgggcgtaccggagaaagaaaaagatcgcattgaggcgctggcacgtcagcatgggctgatggatagcaacgttagccgccaacgagaaaactcgatggcctgcgtttcattccctacctgtccgttggcgatggcggaagcagaacgtttcatgccggagtttgtcacgaaaattgaaggcattctgcacaaacatcatttatctgatgaatatatcgtgatgcgcgtcaccggctgcccaaatggttgcggtcgcgctctactggcagaaatcggattagtgggtaaagcggtaggccgctataacctgcatttgggcggcaatcgtgaaggtacgcgtattccgcgcatgtatcgtgaaaacattaccgccgatgagattctggcaattaccgatgaattagttggccgttgggccaaagagcgtgataccaacgaaggcttcggggattttattattcgcgctggtgtaataaagccggttattgattcagcccgtgacttttacgaatggcagggggcggtgtgagccagtttaatctcaatgaattaaatgccttacccaaggccgagcaggcagcggcactcgcgctggttaacggtcagttggaagtgctttccgcacaggaccgcgtgagttgggcattggagaatttaccgggtgaatacgttttgtcatccagttttggtattcaagcggcggtatgcctgcatttggtgacgcgccagcggccagatattccggttattctgacggacacaggctacctgtttcccgaaacctatcggtttattgacgaattagccgagaaactgcagctcaatctgcaggtatttcgtgctgaacacagcccagcgtggcaggaagcgcgctatggcaaactgtgggagcagggcgtagaaggtattgagcgttacaatgagttgaataaagtggagccgatgaatcgcgcgttggaaacgctgggagcgcaaacctggtttgcaggcctacggcgcgagcagtcaggcagtcgggccaaattaccggtattggccttacagcgtggagtattcaagctactgccgattatcgactgggataatcgccgtatttatcaatatctgaccgagcatggcctgaattaccacccgttatgggaacagggctatttatccgttggagatactcatacaacccgtaaatgggaacccggcatgagtgaagaagaaacgcgctttttcggtttgaaacgggaatgcgggcttcacgaaagctagaaccagctttttcctctgcaatcgcattgggagccttggtgctcccaatgtcttggtggctaaccagttaaatgcaatggttagcagcgtagcctattaaaatataacgtcattttttcattaacattttcgtcgacgttcgttacagacgattattcactctgcttatctaattaaccgctgattttctctctggctaacgctgccagaaagtggctgcgatttttatagttatggctgatttaataaatctatcgattgtcgtcagcaaattttgcggcatggtcaaattgaactataccgctttgctttcgtattgtgtcggctcgatttcgatgaaacctaatacgtcgccgctctaggttaaacgcgaatctttaatatagcgctgcggatttttggggggtgtaggtaagggaaagccatcatccatcaaggcttcaacttgaattgcaaaggttttttccgcgttggcggttgtcatacccctaaacagcctttccttagatggtatacccagaacgaatttatacgcggggaatacaaaaagggcgctcataatgagcaccccgttggtacttatcggactttttaatcagattgcgaatgacttcccactaaaatgattatttatttgctccggctagctcttttaccagcggcagcaggattttgacgctatcccgcgaacgtttggcaatcctgccgggcaagtgatgatcgagataattcagattatcccactgactctggtggcgggtttcccccaatggaaaatgggggctgatagcacgttgttggcaaccgtcttttttgcctaactgatagttggtggcttcgacggaaagcactgaaatgcccgatttatcaaaggcattctgatcggcgcgacagtgaggctctggcgtgttttccgggcgactcgccgctgggattccggcattgcgcgctaacgtcagggcgcgatcgcggcttttcgctgcgaagcttttagcatcatgctggccggggttgaaatacaaacgatcgccggtaatcaaactgtctaaggtgatgaccagcaaggtgttttctttttcctctgcgctcatgcgtttcagatagtttgctgcaccctgagcgccgacttcttcagcgcttaaagcgacaaaacgcaagctataacgggtcggaatgtctttcaaccgctccgccagttcaagcatcacaccgacgccagaggcattgtcatccacgccttgcagcgtcaggccgcctaggtttttatccaaatcctgatcgctatgaggcgtgtaagtatcaaagtgggccatgatcaccacttgctgcggctcgcgaccaccgtgggcggcaatgaccgaagtggcactgaggttgcgccaactctgcttgccgtttttactggtgtaaagatagcgggtattgaaaacccgcaaattggtctggtaacccatggtttcaaattgctggttaagataatcggcggcgagcaattcggcagggctaccggccatacgtccagggaagtaggtggcaatatggcgagtttgttgctcggctattttccctaacggctcacttttagccgctgcggccgccgcattcagtgggaatacagtgctaaaacaaagcgtaacaatcgccagtttcaggtgaaggcgggaaaacatacctaaatatccttttatagagtcgtaatcgcgcagtttggcatggataacgctgcgctatgcggggcttagtatgagactgtccgcgcgattagacaatttgtatggttcctaattatcagaattttttatgtctaaatcaggaatgtcattcgacgctataagtgagcttgcctctgcaaggccgattgcatcggctttatatcattacggaacttgtaattacttttcgtcatttcataaggtcataccccgcccctatagtcaccttacgctttatcatgtaatcgaaggccgctgtggattatctaccaatatttgccgacttgaaacaacgcccggttctggtcgttggcggcggcgaaatcgctgcgcgaaaaatagatttgcttcatcgcgcgggcgctcagatccgggtagtggcgcaggcgctttcttccgaacttcagcaacagcatgacgcgggaaaaatttgctgggtggcagatatttttgcgccagaacagctggacgaggtttttctggtgattgccgccactaatgacaacgctttgaatgcggcggtattcgctgctgcggatcagcggcggattctggctaatgtggtggacgatcagccgcgttgttcgtttatttttccttctattgtcgatcgttctccgttggtggtggctatttcatccagcggtcaggcgccggttctggcacgaatactacgcgaacagctggaagccctgctgcccgcgagtctgggtgacatggctgccgtggcgggtcgctggcgtgcgagagttaaacagcggctcacgtcgatgagcgctcgtcgtcgtttttgggaaaaggcttttaccggtcggtttgccagcctgatggccagtggacaatcgacgctggcagaaagtgagctggagctctccctgatagagccgcaaagggaaagcggcgaagtggcgttggttggcgcaggcccaggtgatgcgggtttactcaccttacgtggtctgcaggttattcagcaggcggatgtcgtgctatatgaccatttagtcagccccgaagtgctggacttagttcggcgcgatgcggatcgcatttgcgtgggtaaacgggcgggcgctcactccgtagcgcaggaggaaaccaatcgcttgctggtggaactcgctcagcagggcaaacgggttgtgcgtttgaaaggcggcgatccctttatttttggccgcgggggcgaagaacttcaggtagtcgccgccgccggtattccgtttcaggttgtaccgggagtaacggccgccgccggagcaacggcttatgcggggattccgttaacccatagggatcacgcccaaagtgtcacttttattaccggtcattgtcgggtagacggtgacgggctggattggtcaacgctggcgcgtgggcgtcagactttggctatttatatgggaacggtcaaagcagctgaaatcagtcagcaattgatcgcacacggtcggtcggcgcagacgccggtagcggttattggccgtggaacccgcgctgaccaacaggtattgattggcacgttggatcaactggacacattagcgcatcaggctccggcgccagcattgttggtgattggagaagtggtggatttacaccaccagatagcctggtttgggcaacaaccgcagactgaacggccgcttaggtcgtcaatcgtgaatttggcataaaggatctgttatggacgaaaaacgactcactcacttgcggcaattggaggcggagagcatccatatcatccgtgaagtggccgccgaattcgggaatccggtgatgctttattccatcggtaaagattcctcggtgatgttgcatctggcgcgcaaagccttcttccccggtaatttgcctttcccactgctacatgtcgataccggctggaaattccgcgagatgtatgaatttcgcgatcgcaccgccaaagattttggctgcgagttgttggtgcataaaaacccggaaggggtggcgatggggataaatccctttgttcacggcagtgccaagcacaccgacatgatgaaaaccgaagggttaaagcaggctcttaaccaatatggctttgatgccgctttcggcggggcgcgccgtgacgaggagaaatcccgagctaaagagcgtatttattcgttccgcgaccgtttccatcgctgggaccctaaaaaccagcgccctgagctgtggcataactataacggccagattaataagggtgaaagcattcgcgttttcccactatccaactggactgaactggatatctggcagtatatctttttggaaaacatcgacattgtgccactgtatctggcgaagcctcgcccggttatcgagcgggatggcatgttgctgatggtggatgacgatcgtatcgatctgcaaccgggtgaaatgatcgcgcagaaaatggtgcgcttccgcacgttgggctgctggccgttgaccggtgcggtggaatcgcaggcggaaacattgccggcgattattgaagaaatgttgatatcaactaccagcgaacgtcagggtcgaatgatcgaccgcgatcaatccggctccatggagcttaaaaagcgtcagggatatttctaaggagcggcccgatgagcaacatgattctacaaaatacggcgatggcacaacaaattgccgatgaaggcggcgtagaggcctatttgcacgcgcagcagcataaaactctactgcgtttcctgacctgcggcagcgtggacgacgggaaaagtaccctgataggtcgtttgctacacgatactcgtcagatttatgaagaccaattaacgacgctgcataccgatagcaagcgcattggtacgcagggtgaaaaactggatctggcgctgctggttgatggtttacaggccgaacgggagcagggcattactattgatgtggcttaccgctatttctcgacggaaaaacggaagtttattatcgcggatacgccggggcatgagcagtacacccgtaatatggcgaccggcgcatcaacctgcaatctggcgattttgctgatcgatgcgcgtaaaggcgtattggatcaaactcgtcgtcacagttttatcgccactctgttggggatccgtcatttggtggtggcggtgaataaaatggatttggtggattatcagcagtcggttttcgagcaattcaaaaacgattacctgagttttgccgaacaattgccgacggatctgaatatcaaatttgttccgctgtcagcattggacggcgataacgtagcgacgccaagtgagaaaatggcctggtacaccggccccacgctgctggacgtattagaaaccgtggatgtggtgaacgccagtcgccagcagcctctgcgttttccggtgcagtatgtgaatcgccctaatctggattttcgcggttattccggcaccttgtccgccggtgtggtgcgcgtgggtcagaaaatcaaagtgttgccttctggagttgaatccacagtagccagaattgtgactttcgatggcgatttgcagcagggcattcccggcgaagctatcacactggttttggctgacgaagtggatattagccgtggcgatttactggtggatgccgatgaaacgctaaaaccggcgcagaatgcgctggtagacgtggtctggatggcggagcagcctctggtggtcgggcaaagttacgacatcaaagtggcgggcaaaaaaacgcgtgctcgggtggagaatattcagtatcaggtggaaattaacagcctgactcagcgagtggtagaaagtctgcctctaaacgggatagggctggttgaactggcctttgacgaaccgttggtgttggatagctatcagcgcaaccgcgataccgggggaatgatatttatcgatcggttgagtaacgtcacggttggcgcagggctgattcgggaaacgctggagtcggtttatcaggaaaccagtcagtttagcgcttttgagctggaattaaatgctctggtacgtcgccactaccctcactggggtgcgcgcgatctattgggaggaaagtagtttgcctgctcattctttgcattctgataaccagcacactttgcctgcggatgtgccagcggatgagaatgtcgtctggcattcccatgcggtaacccggcaggatcgcgaaaggaaaaatggtcaccgaggcgcggtgctgtggtttaccggtttatccggttcgggtaaatcgacgttggctggtgcgctggaacaggagttgttccggcgtgggatccgcacctatttattggacggcgataatgttcgtcatgggttatgtcgggatttaggtttttccgataccgatcgacgggaaaacattcggcgtgttggtgaagtggcaaagctgatggttgacgctgggctggtggtcttgtccgcctttatttcgcctcatcgcgcagaacggcaaatggtgcaggaaatgttagacaacggccagttcatcgaggtttttgtcgatacgcctcttgccatttgtgaggctcgcgatccaaaagggttatacaaaaaggctcgcgccggtgagctgaaaaactttaccggaatagattcagtttatgaatctccaatggcacctgatattcatctgaaaggagatcggcctttggcgcagttagttgagcaattactggaacaactttcggtaaaagccattatcagctaagcaacgaaggtttattggcaggaaaggggcgactttgcaggccccttttatcaatctttttatcgcctgttacccccggattaggcagaaacgctaagcagctcgcttttcatcatggcattcaggtgacgcaggatttcatcctcggagaaatgaagctccggaaattgtgtcattccatccagaccgcacaccagacctattaatcgccaggcaatattgccgctgtcatcacccgaacgaaactcaccgctctctcggccgctattaatgacggctaccgtggcttgatgccaattggacatcgattgggtataggcgagccggatggcatcgtcgcgctcggccagcagactcacctcattccacagccgggtttctctttttcccgcgtcatcttgcggataacccagcaccagcagcaagcgctcaaccgccggatgattttggcaggctatagcaaaggtggcgagtgattgctgaaccagcagcaggaaagcatcggctcgcagttgagagacagacgcaaaatggtggtgaacctgacctaccgccacctcggcttcatttgctacgcggcgcaccgtggtagcggccattccttctgccatggccacccgcacggcagcattcaaaatactgctatgccgctcttcgcgattcaaatatgccaaggatgctcctttgctctcattctgagatgaattaacagtttggtatgtaggggaattatgcagagaattggactgatgttcaacatttcgctacaatcgcatattgaacgcgtgttcaacattaaattctgccttatttgagtctctcattatgtctaagaaatggactattttttgcgttatcattttgatgtacctcccgatttctattgatgccaccgtcttgcatgtggctgcgcctcgccttggattggctttgtcggcaacggggagtgaattgctgtggattatcgatatctattctttggtgatggcttgtttgctgttacctatgggggctttgggcgaccgcatcggttttaaacggctggctctgattggctccgtgctatttggactatcgtcgctggccgctgccttggccgattcggtgggaacgctgatcgctgctcgcgcctctttggctattggggccgccatgattctgcccgccactttatctgcggttcggcatattttcaccgatgagcgcgagcgagcgctggcattgggaatctgggtggcggtaggtaccgctggtgccgctatgggaccattagtgggcggagtgctgctggaatacttctattggggctcggtctttatgattaacgtgccgatagtcgcggtggtggtattggcgacctgtttcctgatcccagaccagcctggtcgcagaacgcaaagctggacgttggcaccggccttggtattgaccacggcaatattattactggtttatgcggctaaaagcgggctgcgcggcaatggcgatttactcggcacctcgctaaccgcagcgattggtggcgttatcctgtacggttttatccggcatcagctttcatcaccttcgccgatgattgattttcgactgattggtcagagggtgattgccgtcggtatgattatggcgctgaccgcgatgatcaccttggttggtttcgaattgttactgacgcaggaactgcaatttgtattagggaaaacgccgctcgaagccggtcttttcctgttgccgctgatgattgcaagtggcctaagcggccctctggccggttggctggtggcaacgttaggtttgcgtttagtcgccactctgggcatagccttaagtgccgttagcttctttggattggcaatgacggatttctcctaccaaatctatcaggcgtggggctggatggcgttgctcggttgcagtattgaaatctcgttgctggcttctactgccgctatcatgagcgctgcgccgccggaaaaagccggtgccgccggagcggttgaaggcatggcatatgagctgggcgcgggtttaggcgtcgcgctatttggtcttttgttatcgcggttgtatatggcttcggtggtattgccggaagatttgcctgcgaatctggcagagcaggccagcgcttctattagcgaagcgatgcaggttatcagcgaactgggtggggagcagggcgagcgaatgtttgccagcgccagtcaggcattttcgacctcgcatagtctggtattaagcatcgctagcggcatcttgattttactcaccgcagtggtctggtacagcatgccgagaaaagaatccgaggctaaattgataaatatatcaaaacactaatgatagaaagaggcgaagatatcgcctctttttttgcccgtaggctactgatgtcttcgttgttccccgcgctccaacactgctattgactattcgcttgaatgacgaacaattagtaacatatttgattgaacaattgttagacgtactgcgtgagagagctattatcaaatcctgaatgtaccctcggccaagcgcctacagagcgcgccgttaaagaatacccttagggatttttatgcagaatgtcacccaaattattgtgagcaaacagcgagaaagggaggaaccgtcgcactcctttctcggcggaaccgccggttttaccttttactggctagctttcgccattccatttctagtctacgggccaaacaccgttttcttcctgctttatacttggccgttttttctggcgttaatgccggtttcggtattaatcggcgtcgccttaagtatgttgctgcgcggtaatgtgctatttaccctcggtgggacgggcattgcggtgatatgcctgttttggatgctgttctctttcctcaccggatggtaaaacgactggcgggtgctcgcggcgaaaattatcgccagaatgcccctatgacctttttaatcctaagcttccattgtgtttttcctcttgctttcctcgcttattacccgttatttttacgcactttttcccttttccctcgcggaaaagtaggtgtaaaggtaaggcaaaatgaaaagtaaaagccgatttagcagtttttccggctaagaaactcacggaggaaagggaatctatgacgactgtcgctagtatagcgtcccaataattgccgttgttttgcagatttgcgtggtatttttgccagaaatcgtccttaatcttaaactctggggcattttcccactcagagtggagtccgacgaaaagttgtgggatgattagtcagtttttcagggggcggagatgggaaaacttacgctactattgttggttttgcttggctggttacagtattcgctgtggctgggtaagaatggtgttcatgattttgtccgcgtgcaaaatgacgttgcggcccaagagggtaacaacggcaaactaaaggcgcggaacgatcagctatttgctgaaattgatgatttaaacggtggtcaagaggcgatcgaagaacgcgcacgtaacgagttgggcatgattaagcccggtgaaagtttctatcgtttggttcctgaccaatccagacgtaatgcgggtatcccttcgacacaaaataacgcgcaacaataaataatgagtaacttcgcaggttcccttcctgaagtcattgctgtattgccggctgctggaataggcagtcgtatgcaagccgattgccctaagcaatatttaaccgtgggcggcaaaacaatactagaacacgctattgatgccttgctgcgccatccgctaattcagcggattattgtagtaataagcccaaatgatgaacagttcgatcggttgccgattgccaatgactctcgcgttagccgggtttatggcggcgcgcagcgtgccgattcggttctggctggcctgatgagcgccggaacgcctgactgggtgctggttcacgatgctgcccgcccttgcctgcatcaggacgatttaagcaatcttttggcaattattggtcacactaaaatcggtggattgctggcgaccccggtgcgagacaccatgaagcgcggtgaatgcgggattgaagcagtggcacatacggtcgatcgtcaggatctctggcacgcgctaacgccgcagctgtttccattcgaattgctgaaaacctgcctgagccatgcgttacgtgaaggtgcaacggtaactgatgaagcctccgctctggagcactgtggctatcacccgttactggtgagtggccgttcagataatattaaagtcacgcgcccggaagatctggcgctggccgagttttacattacccggctctataataaggaatgcacataatgcgaattggtcatggttttgatgtacataaattcggcggtgaaggcccgataatcatcggtggcgtgcgcattccttattcgcagggcctgctggctcattccgatggtgatgtcgctctccatgctgcaactgatgcactgttaggcgctgccgcattgggtgatatcggcaaactctttcctgataccgatcccgcctttaaaggtgctgacagccgagctctgttgcgtgaagcttaccgccgcatccttgaaaaaggctatcagcttggcaatctggatatcaccattattgcccagtccccgaaaatggctccccatattccgcaaatgcgcgtgaatttggcggaagatctgcaatgccatatggatgacgttaatgtgaaagccaccaccacggaaaaactgggtttcaccggtcgcggtgagggaattgcctgtgaagccgtggcgctgttggtaaagagagaaaagcagtaatggacatggaaaatctaacatggctgcacggccaacctaaagcctgcggcgtgttgaaagcaaatcctgaagatttcgtggtggtagaggatttagggttcgaacccgacggtgaaggtgagcatctgttggtgcgtattcgtaaaaacggctgtaatacccaatttgttgccgattatttatcccgtttcgccggtattcatccgcgtttagtgagctatgctggcttaaaagaccgtcatgcggtgaccgagcaatggttctgcctgcacttgccaggtaaagaaacgccgaatatgcaggattttcagctggaaggctgcgaagtgttggaagcggtgcgtcaaaagcgaaaattgcgcatcggttctctcaaaggtaacgctttcactctggtgttacgcgatatcagcgaccagcaggacgttgaggctcgcttaaatctgattgctgctcagggcgttcccaattactttggtagtcaacgctttggccgcggtggcaataatctggtgcaggctcgccgttggtcgaataatgaaattcgggtaaaagaacgcagtaagcgtagcttttatctgtctgctagtcgcagtgccatgtttaatctgattgccagcacgcgtttggctcaaaacagcgccatgcaggtgctggagggggatgcattgcagctgagcggccgtggtagctggtttgtcgcacaggcggaggagctggagtctttgcagcagcgtttggatgccggagagctaaatgtcactgcgccgctgccgggagacggcgatttaggcactcaaggcgcagctttggcctttgagcaaaactgtttggcggatcaaaccgaactgctttcgctgttgaaacgtgaacgtgtggaaggtgcgcgccgcgccatcttgctgcgtccacaggaaatgagttgggactggtgggatgaggttacccttgagctgcgcttctggctgcctgccggtagttttgctaccagcgtagtcagagaaatcatgaatctggataacggcgatgctgcggatcttactgagtaacgacgatggcattgctgctccggggattcaaacgctggctgcggcattgcgtgagtttgctcaagtgcagattgttgcaccggatcgcaatcgcagcggtgcctctaactcgctgacgctggattccgcgttgcgaacgaccacattgtcaaacggcgatattgctgtacaacacggtacgccgacggattgtgtttatcttggcgtgaatgcactgatgcgaccgcgtccggatatcgtagtttcaggtatcaatgctggcccgaatttaggggatgacgtgatttattccggaaccgttgcggcggcgatggaaggacggcatttgggttttcctgcgttggcagtttcgctaaacggccatcagcattatgatacagcggcggcggtaacctgccgcttgctgcgcgctttacagagcgctccactgcgtaccggcaaaattcttaatgtgaatgtgcctgatttaccgttaaatgaaattaaaggtatcaaggtcactcgctgcggcagtcggcacccagccgaaacagtcatttgccagcaagacccaagagggcaagatatttattggattgggccgccgggtgacaaatgtgatgcagggccggatactgattttagcgctgtggaacagggatatgtttcagtgacgccgcttcaggttgatttaaccgcctatgcggctcaagacgtagtcaaaacctggttagccaggactgaggttgacggggaatggtaaataaatccatgcaaaccttactgctacagttacaacagcaaggtattcgtgatgagcgcctgttacaggcgattgaagctgtaccacgggagcgctttgtggacgaagcgctcgcgcataaggcctatgagaataccgctctgccaattggttcagggcaaaccatttctcaaccttatatggtggcgcggatgacagaattgctgcaactgacgccaacatcgaaagtattagagattggtaccggttcgggttatcaaactgcaattctagcgcatttggttgaacacgtgtgctcagttgaacgaatcaaagggctacaatggcaggctaagcgccgcctaaagttgttggatctgcacaatgtttctacccgccacggcgacggttggcagggatgggcatcgcgcgggccatttgatgcgatcattgtgacggcggcaccgccagagattccagaagcattattgcagcagcttgaaaacggtgggagattagttctgcccgtcggtgaacaggcgcaaacgttaaaatatgtgcagcgtagggatcacgagttctttattgaaacggtggaggcagttcgttttgttccgttggtgaaaggggaactggcctgacaattttttaaatcgcgtatttaatcccagcctatttattccggccgggaacccattgggttagcgcgatatgtaaattatacgagattacggtagggcagaggtggtgcaatttgtacccaaggtgctgcatcttatttcttctgcgtttgaccttattattcaaggcgcgcagaggaacctttcatcattagaaaaatgagtgaaacattgacactcagctaggatgtaaagggtatttggaaatatcgcttaatattgctgtcatgggggaagcatgagcacgggaagcccaatgattactttacgccggattgcggcgtgtacggttgtgagtttgtggttggctggttgtactaatgatgcatcaacgtctgcgccaatatcgaccgtgggtggtaaaacatccggttcgatgatgagtggaagtaatgcatcaggcgatcgtattgtttataaccgtagttacaattctatccctaaagggagttacaacggcagcacctatacggttaaacggggggataccctgttttatattgcctggattactggcaatgatttccgtgatttagcgaataaaaacgccattcccgagccttatagcctgaacgtgggccagacaatccagctgggtaacggttccggcggcggtatgatggcggcaactgacgctacctctaatggggtatcaaaaccgccttcaaacatccaaaacacagcttcagcggttgattctcaatcaactaacgcgtattctggtaactcgggtaaacagaatgttggtaaaatgttgccagcatcaggagccgttgcatcaacaacagcacctgttaccgcaccgggcactcccgttggcatccctaccagtaatggtggtccagttagtagctggaaatggccaaccgacgggaaaaccattgatagcttctctgcttccgaagggggcaataaagggattgatatcgctggttcgcgtgggcagcctatcttcgccactgctaatgggcgggtagtgtatgccggtaacgcgctgcgtggttacggtaatctgataatcatcaaacataatgatgactacctgagcgcctatgctcataacgatacaatgctggtccgggaacaacaagaagtgaaggcgggacaaaaaatagcgactatgggtagcaccggaaccagttcagttagattgcattttgaaattcgttacaaggggaaatccgtaaacccgctgcgttatcttccgcagcgatagattgggcagaatacgctgtattctgctcgcggtatcacgggtaggagcagcttatgagccaaaatacgctgaaagttaacgagttaaacgaagatgcagatttcgacgaaaacagtacggaaactgaaatttttgatgaaaaagcattagtagaagatgaaccttctgaaagtgaattagcagaggatgagctgctggcccagggcgttacccaacgcgtgctggatgctacgcagctctatcttggtgagattggctattcaccgctgctgaccgcagaggaagaggtttattttgcccgacgtgcactgcgcggggatgtgccgtcacgtcgacgtatgattgaaagcaacttacggctggtggtgaagatcgctcgtcgttacagtaaccgcggtttggcgctgttagatttgatcgaggaaggcaatcttggtctgattcgcgcagtggaaaaatttgatccagaacgcggttttcgtttctctacttacgcaacatggtggattcgtcagacgattgaacgggcgattatgaaccaaacccgtaccatccgtttgccaatccatattgtcaaagagctgaatgtctatttgcgcaccgcgcgcgagctttctcataaattagatcacgaaccgagtgcggaagagattgccgagcaactcgacaagccggtcgatgacgtgagccgtatgttacgcctgaatgaacgtatcacttctgttgatacaccgttaggcggcgactcagagaaggcattgctggatattctttccgacgaaaatgaaaacgggccggaagacaccacgcaagatgatgatatgaaacaaagtatcgtcaaatggctgttcgaattgaacgctaaacagcgtgaggtattggctcgtcgttttggtctgttaggctacgaagctgcaacccttgaggatgtaggtcgggaaatcggcttaacccgtgaacgtgttcgtcaaattcaggttgagggcttacgccgtctgcgtgaaattttgcaaacacaaggtttgagtattgaagctctgtttcgcgagtaaaaagcttatcggcagcctgaattaaggcaatagataagagagcgaaaacagattcagtattcgctaaatcgaagcagtgttacttcacgatttattgatgatagaagtaaattctgttgctgggttaaataaaaacggtggacatctcgtccaccgttttttttcgactgaaaccggccctttaagaagatggtttcttattatcgagcaatttggcctaaggcactgactgattcagcgccaaaagagccggctagaaaaatagctttaatcgcaaaaatcctaaccgataacgccatattaccttacaccatacttttcaggcgatagagccattccaaggcctgacgagggctaagcgtatcgggatctaaggtttccagtgcttccactgcaggagaaacttcttcattcagcagagtaagctgggagccatcaatattgctacccgctgcattgttggagagtgactcaagctcccgtagcttttgtctcgctcgtttgatgacgtcacggggtacaccggctaacgcggccacggccaaaccataacttttactggccgccccgtcctgtacggtatgcataaaggcgatagtatccccatgctccatggcatccagatgcacgttaaccacgccttccattttttccggcaaggtggttaattcgaaataatgggtagcaaatagcgtcattgctttgatgcggctggccagattttcagcgcaggcccaggccagagataaaccatcgtaggttgatgtaccacgaccaatttcatccattaagaccaggctttgttctgttgcattgtgcagaatattggccgtctcggtcatttccaccataaaggtagagcggccagaggcaagatcgtccgcggctcctacacgggtgaaaatacggtcgactggcccgatagtcgcctgttcggcaggaacaaaacttcccatatgagccagcaacacgattaaggccgtctgacgcatataggtacttttaccgcccatattcgggccagtgatgataagcatccgacgctgtggtgaaagtgataacgggttcgcaataaaaggatctcgtagcacctgttccaccacgggatgacgacctgcaacaatcttaatgcccggtttgtcgctgagcgtggggcgcgtgtagtttaacgtttctgcccgttcggccagattggttaatacatcaagctcagctagcgcgttcgcactcagctgtaggtcggatagatggggtaataatagatcgaaaatttcttcataaaggcctttttcaatcgctagcgccttacctttggaggtcagaactttatcttcatattctttaagttctggaatgatatagcgttccgcatttttcagcgtttggcgacgtacatagtgaattggcaccaaatggctttggccacggctcacctgaatgaaatagccgtggacaccgttaaatccaactttgagcgtatccagccccagtttttcccgctcgcgaatttccagtcggtcgaggtaatcggtagctccatcggcaaggctacgccattcatctaactcagcattgtagcctgaggcaataacgccgccatctcgtactaatacaggaggagattcaacgatagcgcgttctagcagatccaagagttcttgaaatttacctacctgcgatagcaggttctgaacgtggggagcctcaacggaactaagcaattggtgaatttcaggcaattgctgaaatgcatggcgcatccgggccaaatcgcgcggtcgagcggtgcgcaaagccaatcgtgccaaaatacgttctaaatcaccaacctgccgcagtggctgctgcagttccgcagtgatattttgcaaaccactgattgcctgctgacgatgattgagcacattaatgtcgcgaataggcatatgtaaccagcgttttaacatccgactgcccatcggtgttacacactgatctaaaattgccgcgagagtattatcacttcctccggataaactttgagtcaattcaagatttcgacgcgtagcagcatccataataatgccgtcttgttgccgttccatcgttaacccgcgaatatgtggcaatgaggtacgttgagtatctttaacatattgcagtaaacagccggcggcacgcagggcttgatgggcttgttctacgccaaaaccgataagatcgcgggtgccaaactgtaagtttaattgctggcgggcggtatccagctcaaactcccacaaaggtcgacggcgcagcccgtgtcgctgttcaatcaacgacatctgttcgaaggtttctggatacaataattcagctggattggtccgctgtaattcggccgccatagtttctgtatcagcgggttcggaaacgcgaaagcggccagagctgatatctagagtggcataaccaaacccacgggcgtcctgccagattgcggctagtaggttatcctggcgctcatttaacaaggcttcatcactcactgtgccaggtgtcacaatgcgaaccactttccgttctaccggccctttactggttgccgggtcgcctatttgctcacaaattgcggcagactcccccatttggacgagcttagccagatagttttcaatcgcatgatgaggaacaccggccattggaattggctcaccggcagaagcaccacgtttggttagcgagatatcaagcaattgcgatgcacgtttggcatcatcatagaacagctcgtaaaaatcgcccatacgataaaacagcagaatttccggatgctgggcttttaatcgtagatactgctgcatcatcggggtgtgagcgtcgattttgtcggtattattcatgcgtatatatttctaatccattgaaattaaagttaattgtgattttaattgttatcgttaattatcacggtaattcagcataggtaaatactacgtgaatgtggcctaagagcacagcagctctgatcacgcagggggcggtaacctcgcatcggctcttgggacatattatcccagcaactagcaaactgacacgggtaaaagctggaggcatctcgcaaagttatcctgcagtgataggacaacaagcgtagtcgtgcagtacgcactaggttgccgctatctctgatctgtctgtggtaaagaaattttacagataattattttctgcaactcattcgcagtgcagatcaattttaatcataaaataccgatctgtgctcaacaataatcttataacttttttgccgcagctatatatgttgtgcagcgggccatggaatctttgtaatattcattagatagatgaaaaaataataacttataaataacattagaatgttctggcgaaaaaattttcacggcatgaaataatgtagtcgtcaaatatctttaattattcgttcaactaaagttaagattgtgtcacggttagtaatagtccagttattttccttccttccaacatgtgtttatcgatctgtatagctacgattttatcactcatcataattgactcatcatcatattctactctgacactaaactggatgtgtttttcatttgttagaaggttttcagctattttcatacgaaagggatgatttcttttcattttttttgttaggaacgtaaattcctgaattactctgtctttagttgtttctggattcatgttgcttacagtgattattatccgtgagttttccggtatttcctgtattgatgaagaaacgttcccttcaatagaaaacgaggagtgaaaataatgggtgctcatactacaaccagttagactaatacatatggctacaaatagtggaataaataaacgataatttttaaaaataaaaaacatatatagctcattaaatgctaataaaagcgtaggagaataaaattgcggcaataataaaaaaagaagatgctatttttaatttaatatctttaattatgttaagaatctttgtttttgatggtgttgtaggaatgaattcttcttgtgtgccgacgaatctaacgccaatgcgtggaagagtcattattggatcttcattttcacctatcattacaaatgattggcgaagttgcttgataagtttgtagtagctactgtccgtaacaatgacaccacgcgattcccaaatggtatatagtatttctcttttctcacaggttttttctaagagcatttgcaaaagacgtgactcattctcagataatcttatttttttttcatcattaaccaagcttcgttgtaatgtatcaaacacgatgctgccattcagtcgtatggttttccctttgtgcatataatcgtttccttatatcaattcatttacacagactattctgatgttcgtgaatcattaaacgatataaattaggataagtctaatattcttggttcactaaatggttgttataacttattacaagatggttattgataataaatatgaataaacaaaactcgaaacatatgaattaagttgtaaaggtaattaaattacagatggatataagatatttaaactatttttaatgataagatggtttgtgagttgtaacacatattaatttactataactatatttaaggtgtgttagctaacacttgagattttgtctctgacaaatcggcatctgaatatactttttccattatgagtttggcatatttatccctaaatctgggggtttcagagtgataggctcctacagctttccagctataaccatattttttaaacttgagactaagcaaataagccccagcctgaatgttaatacatggagatttcaacatatttgcgttatcaataataccagccgattgcagtaatgagatattaattgaatttatctgcatcaagccaatgtcatgactgccattctcgtttttattcttcgcattgattttccaggatgactcctgagaaataatagattcaagaataacagagggtacattccatttttcggcggcagagtttagacatgtcgaatgggctgatccaacagagaaaagaaaataatatataatcggtgttaaattagaaaatgtcttcctcatcatcactctcaatgtaactaagttgattgtttaatatactgctagtgaactctttaagggttttattaatgatggattcgtttattaaaaatggaatgataatgttggacgaaagctctttatcttctttacttccgcttgactgtagtaaagtattagcatgaacaataatactagattttgtattattatcattgccattaagcttttctgaaatcactttataggcctctttcaggttttttaattggttgatttttatattattaacaagttcataagccaatttatcagaagcatcattttttaatgattgaatgttaattttgttcatttctattctcttggcatttccggtattagctataactttattcaggttgctcgttattttcattttcttctcgctggttgcatgtggtcaatcttattatttctctggttttttttaagttaacaattccgttaatattcaatatgtgtttttttattggtggaaatatttcttgcaagaattcaggacggtctttatttggatcaaatactatgatttcatcacctaccttgagaattatattttcctgattactttctatgacataagattcattcttcaggtttcctattattttagcgtaatgaattttgggaatgtgtagttcaatatttggtgatgatattgaaaagccatgaaaatgctcagaaaccaattcgataaatctcgtatctccaaatatttcctgtaatttatttttaagtctcacctcaatattggcaatatttttgttgcatatttcttgatagaggcttattgctgaaatgacagtgtcaataaataaaaaaatcccgctcttgaagccaaaattatgtgcttgatcagttatatgtttgatttcaacttcagctttagacaaccttttttttgcttctttctttgcgtattcgattatgcgtacttgataagcattagaactaatacagcacctcttgataagtactttttcatttgatatttcatgcaagggtgttttttttacttttaacatgataacaaaccatttctatcaaattgaagggtagtctcgcacattgcaatgtgcgcatgatgttcatcacacgttggctaaatacgcgttcagctctgcttttcaatgttgtatcgaaaaaaataatcgtttcaacaagttgtagtgcgccaaaagccattatataatttggggtaacatatttttctttatacttttgtaatatgtatttgaacttaggtagcatattgtttcttaactctatatcatcatcggttaataaatatggatgatgttttgtatcaactccaagtattcctaatctccaggctatatctggtaagttaccccacgattccttaatcaccttaggaatgcagagtgacagcttgcgtggaataggtagttgatatttagcaattaaataattattttggaaagcctgaagataaattggtgagttattatgctccattattctgtgatcagaatgaaagtagcttccaggtgatagcaatatttttaaatgatccattaaattctcctattgggtattgatctttttggatgaaccacttcttttttccataaaacgtgcggaattacgaaaatagaagagcatgaaaataattaagttagtgattaggatgattatcaaaatataatatggattaaaagtattagatttactatctagtgatacactacgttgaataatcggacgttcaacaataactacagagacattgtcatatgaactgtctgaaaaactattttttaaaaaaagttttattttagtcatcaattggtttggatcttcactaccagcataagtcactaaacaggatatattttgctgctgagtagtcctgctattatttaatagaggataactcacatgcactctggcattgacaactcctggtatggtcaaaacagattgttcaagccgctgttcaatcagtgaaagtaatctggctcgttctgcatgaggtgaggcaactaaagaatcactgggaaatgcctgaataatttctacggattctttagaaggcaagttatattgcttgagtaaatctaccgccgcaataaaatcatttttagaaacatgaatggagtaacccaacttgccatttgccttttttttaccctgaataccgtattgttgtaaggtcgccaagacttcattgctttgacgctgatctagctcggttagtaaatcttggctatcgcagccagtcaaaaatagggcaatggctgcacataatataaaccggcttattcgcatcattattgagattttatcgtagtttctacagctgaaatagctttacgaaccaatgtattcgccagtgatacaacttcagcatgttttcccaatcgtatctgaccgactctgattaattctgcggaatcagttatatttccatgctcgattaaattaactattgcagctttctcctgactggttgctgcagcttgctggctgaacaatttttttattatcccttcgatctggcctgctccgtcgaaaacggattcaccaatatcagggagctgatttttaaatgaaattaaactggttaaatgactcatgtgcaatgctctaatttatattatatagttctaaatattacgaataatcccggatgtaaggtcgaggagtttctttgcaacgttagattgtgcttgcctaagtgcagaatattgacctagatacaatgtataatctattaacttaattgggttagagatatcttctatagcacttttttgcgccgcctcgattttattcattaggtcttttgtgggctcagtgaatttcccagcaatatcataagcaaagtttgctgtttgcccggatagtggtgtcgtgttttcaaagttcttaacggtatagtttggcgtggataatgttgtcgttggcatgataaatttctctttattttcttagtaagaatgttgtttaaaatcccaatgattgttattgatttttatattttcatttatatcattaataaacactccttcatataattcattatcactaagtgaaatagagaattgaatgtaattactcccccattcactaatgaattttttgacaaaattcatggttgatatcagttgattgtcactaagatttgagcttacaaccacaataggttttttttcatcttctataattctgaatggcacattacttgcttttattcctcttattgcatcatcaaaaattgcttttttatgataaaacttaacttctatctcgttagcacagctaactctagattttatcgtttcatttattttttctacttctgataagtaatccgagcttttcaataacttaacaataggtgagcaaggataactcatatcaatatttaaaactgacgatgaaaagggggtgattaaggacattagctctttctctaactcgctaactaaaataatgtcaactaagccagcatagtttgacgtgagcaattgctgagatacccagtctgcatcgcggcggctatttacaatgacttgatctttccctcttccttctgcttgcagaataatggtgaaatgaattgatgattcacctaaaagtttagatatgttgcttgtaatgattttatctacttgcacattagaattatgattgttagtcatgactgttaataaaatcaagccaacagttaacattgaaataaatataataattaaatgcttagatgttcctctctttatcaagcttccatttttctgtggtagagaagagtccattgtatctttttgtcctagctcatcgaaggattcataattccatgaatcatcgatcgacttaaccagtataggaaacgtatcggggaataagaccgtttgtaatatgacatcggtagtcagtttaggtgtgtctttttcattatctaaatcttcaaaaatgactgatagtttagcatctgatttgtttgcttcattggtataggatgaaaaaaaagttaacttataattgccagtatcaataggaaaaaagtaactgattaagtcattctcttcatcagtcacaacgttatagtctgtctctgtgttcgcaaatatcaggcaacctttagatttaaacaataattcggtgccagtcattcgaccagaggctatttttattatataaaaatcggcgttattattcatagcaacgaaggttctattggtgtaaaaatcagtcattaatgatgagctgtatttcttaaagagaatacaactaaaatagttcgcatacatcttttaaagtttggttattattgccgatttgaatctattactcatcggaataaatcgcactaattcttatcgtttctggtaccggcatccttttataaaggatgtttttttcctaataattccaaagaatgtgattgttgctaattgtagagtataaccagattttgtttaaataatcagatgctacttcctgttaaggttttttattcatgagtataagtaagagcaacaataatgtggacggagaactacctgctcttgattgcatgattttctatgtcaggccaatggtgaaaggttctatattagaatacccatcatttatacggaaagaaaaaggtctggtactggattcctcacttttaattgcgccgagtttggatgacttaaatcagatttccggagtttggagtatcagtgggatacctatatttagtgctattgaaattttagcaacgcttgatgaggctaaatcacaatcaaataaaggtaaaaggcctccatccgatagtgaaatcaaatttgaagattctgtccctgtctggtatgacaggaattattcaacctggcgtaattctgaagtgagtggtttacttatttctgaagtcatgaacggggggggggtattatttatcattattaaatattcttcgccggtatgaggcatatggaatattccgttatcttatttcacagtcagctaatggagaaaatataaaaatatctcagttgagcaaaaattatggattatcgtccccctactttagatttctgtgtcgtaaaagttttaattcatcggcgaaaaaaaagatgatgagttggcgtatggcaaccgcggtcttactgctaattgaaagtgatatgtcaatattggatgtggggttagcttgtggttactgctctgcatctcattttacattagacataaaaagaaatttcgggctcactccatctgagataaggcacctggagagtggtttatatgatagttaatccataccttttctctaaaatattaattttatctttattaacttttagctatgcctctccaggatttggagaggttattaccgctacgccggtagaccgggaaaaaagtcagagttcatttattgccaataatataacgattaataaggtatttgacgtcgtttcatccaggatagaaaagccgattattcttagcaaaattgcaatgcaaaaaaaagtgactggcaattttgacatgtcacaaccggaagaaatgtttaagtcattagctagacggacggctttaatatggtatgacgatggaaccagtatatatgtatatgataatagtgaaattcgcaatgaactaataaacttgcgttcaacaagttggagtgagttgcttaactatattaagaccactggaatttatgactcgcgttatccactacgttcagagggtaaagcatccgtagtctatgttgcaggccctccactttatgtcgaattagtattagctaccgctcgctacttggatgagcggattcaagtcgaagagaaagcagggactgatgtgactattatcccgttaaagcactcgtcggttaacgatcgtgtttttagccaacggggcaaagccgtgacgattccaggcatggtcaccgttattaattcattgttcagtaaaaatgctttgggtaacaacgttcatgttattccgcgtgaagatatttcaaatcagatagaaacaggttttccgttaccaccggcggcgctggatttggcgcaacaaaattacggagctattactgacacgggaagtagtcacttttccgtagttgcttatcctgatagtaatagtctgttagttactggttccgcgcaacaaactcgctatatatatcaattagttaacgccctagacgtttctcgtcggcaaattgaactttctctctggattattgatatatcgaaaaaaaaattagatgaagtgggcgtccgttggcaggttggtagcgtaaccgcaggcgggggtgacattgtttttaatcaaagcaatctgtcaaatagcgccaggtttttggcacgtattgatgcaataagccgtactggtgatgctcaaatagtttctcgtcctatcgtattgacgcaggaaaacgtcccggcactttttgataacagttcgagtttctatgctcggctggaaggtgaaagggtcgcgactctcgagcaggtgacctacggcactatggtgagtgtattaccacggatttcgcacggagggcaggttgaaatggacgtaaatattgaggacggttctcccggtcgtagcggtagcggggatgtagaaaagattggcggtttacctgtagtcaatagaactcatatcagtactgttgctcgaatagccaaagaaggcagtttacttatcggtggatatacccgcgaacaattagaagaaaccgaggagaaaatcccgctactcggtagtatcccttatttagggcgactattcagctatagaagtactaatcaacaaaaaatgattagggtttttctgatccagcctcgtttattaagtgagtcagaggcctgggatggtaggcaattttcagaaaaagagcgtttgagcgatagaataaaaaacaaaaatgaacagctacaaggaacgataaaattattgcagaactatatggatagtccatggccatagccccacttggtggaaactcacgttatatctcggcgcaacgtgataagaatgaggaagctcaaaacactgctggtgacagtgagaatacgctacgtgggcaaggcatcatcgataacactagcgaatatgcatcaatggcgatgttagcctcgcagtttaatcggcgcaaagaattacgttcatcgagtgatgataatacgatatttaccgagagaattttggatgataacgctgacgagaaagtaagtcatattgaaaaaatcattaatcgcgaggaaatgactcctcccaaattacgttcttttctggctcagttgtttcctgataccagcgacatgttgatggttatttttgagctcctacgacgaaaaaaactaaccagtaagatcgttagtaatttaaatacgttgaaaagtgtcttaaccgaagaagatacagagcgtaggactgaagcgggcgttaacgtagcattatcggcaaggttgttctcgcattccttggataagacatcgattcaactgcgggatatatatcgtgactttatttgctacgatggcccaatcatttatatttacgaacaatgggtaagtgaaataacgagtcagcaacgagaaattatgctgcgttacctaacacgttcactagcttgcgatttgcaatctatccctacaggaaatattaacgttgtagaatttggtgatctattccgtagagttggtggtttaagggagattcaatcagttgagattcattttctgcagaaaataatgagtacagagcttataagcataagtaatgatcaagaattgtctaatcttttcgtttctgggatcaggaatatagataattataaaataagtttggccaagttttattctgaaaagttatcattagtgacatatgaaaccaaggctatttttttacagttgttattgagtggtttctccagtgtgtctgtagatatttttttctcgttagagaaaagggacaaactcatccatttaatgaaagaaaaaattagccagataaaattgaaagaagatgcagtgaaaagaataaataaagttaagagtagggatgaaaatgcgtagactgtcatggttcctgcttcaacttaggagtaagcctgagttaatggttcttttggtaatggtgacagtgatagctatgctagtcgtccctttaccaactttcttaatcgattttttgatcggtttgaatatcatgatttctgtacttatttttatgggttcgttttatatcaccaatattcttaacttcaagacatttccctctattttacttattagtactttatttagactagcgctctctatcagtaccagcagactgattctattagaagctgatgctggagatattatagctacttttggcgagtttgttattcaggacaatttagtcgtagggatagtcgtcttcgccatagtcactgttgtgcaatttattgtaatcaccaaaggttcagagcgtattgctgaggtggcagcgagattctctctggatgccatgcctggcaaacaaatgagtattgacgctgatgcgcgttcgggaattattgataacgatcaggtgaaaataaggcgaggcgttctagaacaggaaagtcagttatttggttcttttgatggcgcaatgaagtttattaaaggtgatgctatcgccggtatcattattatttttgtcaatcttgttggggggatttctgtaggtgttgctcagatgggaatggatatgtccgctgcactcagtagttatacacttctgacgatcggtgatggtttggttgcgcagatccctgcactgctgatttccatcagcgctggttttattgttaccagggtgagtgggaatgataaaaaccttggggaaaatattgtatcagagctattttataatgacttttctcttctggttactgcaattataacttgtactataggtttcttacctggatttccaacgttcatatttattatactttcctgcctactttttggtctgtatttttatcggttctataaaaaaagtaaagaagataaatcggttaataaagtacctacgggagttatagatactcctaataatgttactaccggcgagaccatcaggactatagagaacattgatgattatgttccagaaactctgcctataattgtttcagtgtctgttgttcatcagaaaatattagaagatagagacttttcgctaaaaataaaaaaggatattttcataaaatttggatatagagttccagatatagcgataaattactcccctaccatcgagcaaggaaagataattatcttgatcaatgaaatatttgctggcgaatttagtataagattcggtcatttaaaaatcattggttcaactgatgaactggacattttaggcatagagttatttgttatacaagaagataatggttcttcgagtaaatggattgatagtaaaaaccaggaaaatgcgacggcgctaggtctgaatttttgcgatgatataacggaaatggtcggttgcattagcgggttattattacgtcatatccacgagttttttggtattcaggaagccaaaaatttattagatgatctggaagctaaatgtccagaattactgaaagaatgttatagacatgccacagtacagaaaatcaccgaagtatttcaaaggcttttagccgaaaaaatatcaatacgaaatatgaagctgattttagaatctttagtgcaatgggctcctaaagagaaagatacactgatgttagttgaacatattcgatgtacgttaaaccgatatatatcagataagttctcagttttaggcgtaatgaatgtattaatgcttggcggaggtgttgaagatactatcaggcaaggaattcgacaatcatcaggagggacatttttaaacttagagccagataatgcggaaaaaatagttcaatcactatcgctggcaataagtaatgtaaatatctctttgagagatttgatagttctagttcctgttgatattcgccgtttcgttaaaaaaatcgtagaagatcgtttccctgatttagaggtgatctcctttaatgaaatttcagaatctacaaaaataaatgtaataaaaaccatatgaatggagtttatatgaaatataaatttattgaaatgcttaatgttttccttagctcggtagggcgtgatgatttagttaataaaaatcttgattgccactctaccgttcaacttgagcttgacggaaggcaggctattaatgttgacatgcacagtgatgatattattctctggatgtcactatctgaatacattccttccaggatcgagcaggtcagcgttaggttacttaactctatattagagtatcagtcttcttgctttcaaccagggcagccagcgttacttgttcatgataatttattaattatgagcgccgttttaaatagcgcagctttggatgatttgagtttgtttgctaatagtctggaagaattcttcgatcgcagcacgcatcttgaagaaattttaatttattaaattatgagattatttgactatggcgctcatccaacccgaataagcggtgtattaatcgaggctccattacctaggtgtttcatcggcgagatatgtgtgattaaacgttctttgactaacggagagttaatcgctaaagctcaggttattggtttctgtgccgggcaaactctattaagtctgataggtcgagttcagggactttctctggatgcggtaattttaccgttgggtaaaccctttcagtttcctatgagcgagtctttgttaggaaaagtatttaaggcctcgggtgaggagattcagtctttctacagctcttctgaacctccagataaccaaccgttggagtggaggaacatagattcatcgccaccagaaatcacacaaaggagggcaattggtaacagatttgatactggaatcaaagcgatagatggtttacttacctgcggcagagggcagcgtttgggtattttcgcggctgcaggtgcaggcaaaacatcgttgatgaatatgataatagcgcattctgatgctgatgtttgtgtcgtcgcgttggttggggagcggggacgagaagtcacagaattcattaatgaaatagctgattccccgcgccgagactcgaccatcctggtttatgctacctccgatagcccttcggtggagcgttgtaatgcagcgttgctggccacatcaatagcggaatattttcgtgatttgggaaagaatgtggtgttatttgttgattctatgacgcgttacgccagagcacttagggatattgcgctgtcagccggggagttgccagctcggcgcggttacccagcttctgtatttgagcaacttccttctttattagagcgaccaggcaacatgcaacaaggctccattacggctttctatacgatattgctagaaagcgaggaggagatagatcccattggtgatgagattcgctcaattctagatggtcatatttatcttaattatagattagccggacgcgggcattatcctgccattgatatattaaagagcgtaagccgtattttctcgaagatcacgactcctgagcattatcaggctgccacagatttacgggacatactagcccggttagatgacattcaattttatctggatttaggagagtatcagcgtggtgaaaatcaggaaaatgatcgagcattagatagaaaagagaaaatagaactgtttttaaaacagaagaccggtgcgaagagtctatttttagaaacacaaagagcgttgtatgaacttacttcttaaaaacaaaaattacttacgtttgcttgaaaaaaaactgaagcgttcccagattgaattgaactcaataaataagaaaataacatcagtgagtgagaaagttgaaagcatcgctacgcggatcgaaatcttagatatgcaagctggattattcgatcagaaaatgaagtttaccagagaggatttttttgataatcgccgccagaaatcaatagttttgaacgaaatattcttattaaaatataagatagaaacgttggatggagatttacagcagctaaagcagaacagaaatataatcaccaagcgagtcatgaattttaatataaagtgtgaaaagttccaaaaatatcttactgggttacgctgcaaccatagtttaaaatctgagacttcgagggaaattgaaatcgaggagctgtcggctcatggtggtattcgaatataaaataaatccggtattaaatattggacatcatgagacagtatcaattaatgatgctgtatccaggtcttttatcaccgattcggtgctagtttctgtggcaatgttacctgaggatgaaacgctcctcaataaaaagttaaatcaggttaaagcgccgtttctaaaagctagtttatctcttgatggtgaacagcaggagggtgggttgctgttagcacctttagttatcatagaagcgttattacacattaaacagggagtctcttttagtgctcagcctgaagtgaaagaaatacatgattcggcattaacatatttatttggccgtgagtttattcatatgagctcattcgcggggaataagggtgtgggcaaccaaagaagaatatcgagctctaaagttcttatcgctttatctgatatattgaagctcgaaagtactcatattgattcatctatgcccacggttcagcgtgaattacaacaatatcgcggtgaatatcattcgggagatataagcacgccaaatcagaattcaagtgagaagaatagagagatattgaccccatcgccacagaataaaggacctataggcggaatgataacgggtgatgccgagcaattattgttggagtcagaatgtctttctgggtctattggtttgagttggtcacgagaagttgatgcaacggatggttttttagataaggtaggtatgccagggttacagaaaatagatctaacgcctactttttacagtgataagacaggcacttttgatgacttttttgataatgaggtgagcaagtatatgccgttaccacctgagaacccagagaatgcatcgcgtgggttacattatcgattttcgtcttggagtgatactccttcggtcagaattcaactggcaaagatgcagagaatatttgcaacggcctctgatgataacgtgcagtatattttagatgaaaattatcatttgctggaaacagaacggactatgatctttgaaccacgtaaaacatatagagaaagaaaatttgattatggatattcggatcaggatgaaaaaccataatgtttaattttcggcgggttactcggcagcatgcgctaataataaaacagcagtttgactatgagccacaagtactgccggagacgatagcagccaataggacatatgcaattttccagcttcattgctctaaagaaagattaattggagcgatcgatcttgttgattggtgtcgatacatttggccagaactggctgggttggcctgggaatacatcggtgaacagcaactattagaattatttaaaaatgaagtaagggaaagaaaattattttctggggtttactcattacaagacattagtattttatctggagaaacaggacggaaatattggttgaaagttcgtgaatatcatgttggctggattttattatcgcgtgcaccaatttatttaataccaataaaaggcgaaactgagtcattaagacatttaccgataatgagtaaatggattctaggaaccagtaacatcagttatagactattaaatttattggaattgagagatgttcttctagtgcaacatattttgatggaacttaagatatcagataaggctatagcaacatttttatatcaggatcagggagcgattattgtggacacattagttgataacgaaggaaatactgaaaatgattttttggatgttttgaacgagaatccagacgaggaattaatcgcttttcctataaaaatgtccgaaatatcagttgttttaactttcgttcttggtaaaaagtcaataagtcttgatgaactgtcaaagattcaggcaggatttcagtttgaactagaacaagaaatggaaaagaaaataaaaatctacgcaaataatcatctgtttgctgaaggtgaattaatctatattgatgatgatttaggaattgaagtaacaaaaatggccactttaggcaagatagagtagataaaaatgcctgatgacatatcgcttattgcaataatagcaattgcttcactcttgccatttattatagcttccggaacctgttttttaaagatatcaattgttcttattatggtccgtaatgctatgggagtacaacaaatcccgtctaatattgcattgaacggaatcgcactacttctttctctctttgtgatgatgcccgtaatcagtgacatcaatgagtactcaaagacgcggaaagtaatagtaacagattcaatatcgattgaagaatttattgatggagggctagggaaatataaatattatttgaagaaatacgctgatcctgaattgatttcattttttgagtctgttcaactggggcgtagcgaggaagagattgatattgaaaacgaaggtgcatcgctattttcacttttaccggcttatgcactcagtgagataaagtctgcttttgaaattggtttttatatttacctgccttttgttgtgattgatttaattatctcaagcatactgttggcactaggtatgatgatgatgagtccggttacaatttctgttcctataaagcttattctattcgtggctatagatggatggtccctgatatctaaaggattaattatgcaatacatggaactttctcagcaatagcttatggaacagataatttatgcaagcaataaggcattgttactcatcgttattctatccgctattcctgtattggttgcgactatagttgggctatttgtcggattaatacagacggtaactcagctacaggagcaaactttgccttttggtttgaaattactagcagtattcggctcgttatttatgatgtcaggatggttagcagataaaataacgagttataccctagaggttttatctattgcgcttcaaccgctaacctaaatgttgtatgaataataatactattaacttatatatttctttatacgatacctttagctctggcatgataacgctcagtattgcctatttacgcattgctccagttttctttctcttgccttttttaaacactaaacttctaaatggaatagtgattaagaatagcctaattatttatataattttaggtctgtggccatatttatccgtaggtgatgatgtcagagagcagcgagaaattattgatattgtattatatgaactattaatcggcattatctttgcttttctaatttgcttacccttctttgtagctaatattatcggtgagataattgataatcagcgaggtgcgacaattagtgatacgattgatcctgctaatggcattgagtcatctgagttttctgcatttcttaattacttgatatgcatgattttcttagctgatggcggggtgtataaattagtcgcggcttttgctgatagttatcgcatgatgccattctgtcagggtttttctcattttgaaccactgataattggggcttggttaaattcattggtgagccaagggttgatactggcatcaccggttttggtgacattatttcttagtgaggttgcactggggctatattcacgtttttgcccgcaacttaatgccttttccctctctctagcgataaagtctattattgcatttagcgtttttttgctttatttccataatgaaataccgtcaatattagtatctatggtagacatgtctcttttattggatatttttacgcttaaataaattaagttatttttatttgaatttcgatgaagtatattttttatttgggaatagaatggcagagaagacagagaagcctactgacaaaaagatccgcgattcggcgaaaaaagggcagagctttaaaggaaaggatctggttgctgcagcggttttagtttgtggttccctggcaattagtgggttctcgagtcttgagaatataggtgaattgctacaaaaggtactactatcgccaaaagagattaacatacctgcctatctagatgagttgtatcgaatttttctctatgccgtagtgcctgttttgttattctgtttattgcctggggttttactttctttattacaaagtcgtttcaggctggcaacagaggcgttaaaaataaacttctcgcaccttaatccaatctctgggatgaaaaagatatttggcataaggccattaaaagaattagttaaggcaattttatatttgttgtctttctctacatcaatttatatattcatcatggtatggaaacgagatgtatttatgctttatcagtctcagctaagtgaaatgatagagcaatggtcatggctgtgcgttgtttttatttttttatttctctcgtcatcattaatattgttgcttctggatactttggctgagatttatctgtttattaaggatttaagaatggagaagcaagaagttaaaaaggaatataaagaaagtgaaggagatccaattataaaacatgcgcgaaaaacaatacatatggatattctgtcagaggaaacaaagcatagtataaaaagctctcaactcgtgatggctaatccaacacatattgcattaggtatttatttcgatccagaagtcgcagatttccctgttgtaatagttaaagcaaagaatgcagaagcgctcgcggttatcgcttttgccgaatcggaaggtattcctgttgtaagagatattattttagcacgcagaatctaccgtaatagtaatatttttagttttgtccgagacaatgacatgctggatgtaattaatattattatttggctaaaaagaatagaattagagaagatgggtatatatcttcctcctgcagaagagcttgttgaagaagtgaaatctgataccagtagtggaatcgatagtgatgattctaataacgttaataatcagtagagcaaatgtattatgatgactataaatgattataggttttttatggtttttataattatttctatatttcccaatcgttttttaaaagatagttagcgtaagtgtcgtctagactgaccttggtatatcagggctgtttggctatataacataaggagagcgcgatgagtgaatcaaagaatgtagaacaggctctgataaatactgccattactgaagatgagaaatatattgatgatgtctgtcaggcattgttggatggtataacatttaaagatatacatgatattcctgagtctacaatgcaaggaatctatgcatacgcttatgagttttatcatcaaggtaagttagacgaagcagaaacttttttcagattcctcagtatttatgatttttacaattctgattatgtcatgggattagcagcagtttatcaattaaaaaaacgctttgacaaagcaacagaattatatgcattggcatttatgctagcgaaagacgattaccgaccactatttcatgcagggcaatgcaacttgatgctaaaaaaaacttcggcggctttgcattgttttgagactacggtgattaatacgactaatgctgagttaaaacagaaggctcaggcttatttgtctgctctcaaacaaaacttggaagaaaatcgatcctgatgtacggggcagggacgataaatttatttaaaggaatatattatgactattgaccccagtaagcttaccagagaaagaattaatcatgctttatcttttgttgctgcgggagtggggccgggtgggttattgatcgcgaaagataatgccggcaaagaagttttggctcttgaggatgcctgtcgagaattagctgcagaggaacaattgagccggcaacgcaaaggtattaacggagccccgttgctaacgaaaccgcagcttatgacaaaggctcccttggcgagccggttgcagaatattgcccattctgataatcgtcctgctgagggtaatttaacgaaagaggctacgccattaaccacgggtaattacctaaatggcaatacggcattactgcaagccatgctcaacttacaggatattttccataaagataccatcggtaatatgcagaatcggctgaaacagctcaacgtcgaatctgaaacaattcaccttcaaggtcatgctttagtggcctcttttgaggaagtgaatattgagctgcgcgcggcaaaccaacgaacgaaaatgtatatagaagacgttgaaaaagaacgtcatttattaaatattttaaaagcgaagggcagttcggttgctcaaaacgcacgttctttaggctcacaacctgcatttagtgtagaaactggcccagtgcaaaagtatatagcggccttccccgaaactgtgggttctaatgcccaaactcccccttatccacaatctgaactgactcgtgtagataaggaaattgctacgcttcaagtacgtttggatgcaaaagagaaacaggccgcttgtgcagttactgatgctttggctatagcaaaaaaagcttccacctcgcatgaggaaatagaaaagtttcttacagaaattggtaatcgcgcacccggtagtatagataaggaaaagcatattagtgcgttaggacaactcgcgattctctctgctctgctgaaagagctgattggcaaattgaatcttgataatgcgttacgacaaaaggctattctggaaaagatagacgaaaccgcttgtcgtgatgcagaaaacaaagctaaagagtgtgaggcatcgcaaaaaaaagccgaagagaccagtaaggcggcatcctgcgctagtaaaattcttagttacgtgatgatcgctgtttcagttgttgccacggtcgctactctcggtgctgcgtctgcattaatggtttgtgttgcagcggtcggtattgctatggcggtggcagacgtagtgcttgaagcaacaggaaatagtagcttaatgcaaatgctagccaaagaaatcgccactggtataaccaatgccctgattgcctgtggcgtacccaaggaaaaagcggaggacattggtaaaattgttggcgttgtattggcggctgttgctttccttcttatttctctggtttcattgtcatcattcgtaaaaaatatggcatcgtctcttgctaaattaatcggtaatggtgtgctgaaagcaggtgcaaaattactgcccaaagccgcagcgcatgctgtagggaatacggctgggaaggtaggggatagtctgaatcaaggcattagccgtataggaaaggcaattaataactcagtaaatattggtgagacgactttgcgcaaggtagaaattggctccaaagtaacaggagctgctgtgaatgtgaataacgtagcgatatctggaacgctaaatattatttctgctgattataacttagacgcaaaaaatatatttgcagatttaacattaaatacagagtttattcgttcaataaacgaattgattcggcgcataatggagacactttcaacatttacgaaagtaggcgctgaacatttggacaatatgattgaagggatatatcaatctcaacaaaatcagttggccgtggttagacgtattgcgagctaattgtttcgtgatattacctgattattaaaacagtttaatctcgataaatggagttattatgagttcaaactttaatgtcaaatcccaagcgcctgtttatcatcctgcgataaactccgatcaaaaaaatagtccaataaattctagtgaatcagctgagggaacaataaatagtttaaatttaaactcgttatctggattacaagatggatcattaaaacttccaaactcgggagtgactcttgtatcccctcagaaagaaatcgatgaaagtgttttagctggtttatccaaaaatttgaatgaattcatgcaattgtattctaagaatgctcctcataaaagatattcgccaaactcagagttacaacagacccagtcagattattttacaaacgtactcgcacctgagtttctacataaaatttctggagccttgattgcacgcgagattggtgtagatagagtctcccactttgatgggtttacttcagataatttaatgatattcatcagatctatgatacagcgacaacggatgactgcggatgaaagtaacgccaagataaacatcttcctagcttcgctaagcgctacaatggctgaaaatgcagcagattcaacaataaaagagggcaagcagcaactgatcggggccatattcagctttgttatcggttctgtcatggtgggcgccggtagcggtatacagctacgtggcttaaataagcaaaataggatgctgaatgcagaagttgaacagcagcagccgaatattgctactaataaagttggtgacgtcaggcagagccttaatgttatggattcaagaggtgccagcatgaatgcggttggcacaatgaaaaataataaaataggaacgctaaatgaaccaagagaaaggatgtcttccaaagaaatacataatcatcccaaagataagatacaaataaaagcagagcgagaacgaccccaagatcttaattcatcgttgagtacggccaagccaaaccgccatactgggcgtaaattggagatagttggcatggctatttctaatatggcgactactggtggtcagatggtttcgggtatcaacatggcggaagttaaaactattgaagccaacaagatgatacaaaacactgccgcagatataactcaaactattttaagagaaaaagaaagagccgctagctctcttaatgatatgtttaaaagcatgcaggacactattaacgggataatcgctggtcaaaatatgacatctgcaaaaattattcgtggctaagatatttaaattaaggaatcatagttatgataatatctacagtgaacgcattgccgatcaagcagaattctagtcagattgaatcgttacattctacgttgaatggtgggggaggcgatgttatcaatagcgacttttttgattctattatatcacgttaccaagatggtaataatcatccgaatttaataagtgattggttaagtttattggcgagtgacaatgatggggtaagaagattgatcgcggtggaaaaaacgggtgtaacgaaaggagatactcaacgtgtcattaaccgtgtgtcagatgatattcatgataaatatgaaatattatcttcaaaatataatcatgatgaaataaatatacctccacatataaaaagtttgattgaagttgtagatattggttatgaagattttcagagtaagcataaagaaatagttgagagatatagtaagtattacgaagcttttagtgagggactcagtgcgcagtcaaaatatgttggggctgggagtgatgcaaataaaattgattttaaaaaacggagttttgccgctagtctaaacgataaacttattatctatagtcatgaaccgagtttttatgatgcagaaactggcaaaataaatgaaaatgctttttcaaatgtaaaaacactttatacgttaacgggtgatgaaaaaagatttaattactggaagaaggaactgtcacctgaattaaatgtaacttgggataaagagaaaggatatatttatgttttacctaatctggataatttaaagagtatatttaaaagtcttgagaattctgatggggtaataataaataaccttagtggaaatgatgacatcgctaccgcaacttatcaagcatggcaggcagggaacgacagtataaagaaccggcagcaaaatgctcttaaccagcttacggagaaatatggtcatcatctcaataagttggaaaacttaattcagttcttgattagagctatagaagatcacgccaaatccaatgaaccaacgttaagaattctagcgtagcaaagggatattatgtctgacacaaataggttcgccaacactcacgatgttttatacgttggtatattacaatggttgcagaaaagtcttgttacgataactaattgtcctctgtcgaaaataaatccggatgccagactaatactggatttgcatatagactctctagaaatattagagttggttattgaggtagagaaagaaacggctaagccgttagctgatgatgtttggcataaatggaatacgataaatgatatcgtagaatatataaaactgacgaagataaggtgagtgtatattctgcattcgatgtaatttaaaatatcgtcattataaaacccgaatcagtatattaaactttaataagcaggttgtggttttacgcggctggtttctattctaatatgatgaatccatctttttacgatgagttaatcaatgctatcagttaaatatccgttgctcctgctattaccactattgctcgttaatgggtgtcagcggccaacaaatagggctccagtagtggagacaccacagcagattgaacagctatctgcactgatttctggtgccatgtatttgcgacaggaatgccaaaggaaagatattcctgatgaatcaatacttatgcaaacggcggtaaaactggcaatggagcgaaattgggataccaaagcaccagcttatcaagcgctgaaagggaaaagtcaggcacgttatcaggctcttgtggaagaaattggcaccgataataatcaatgtccttctcttaacctgctactggctgattttgcctatgaagctcggcgtaacatgaaatgacagtatgttatcttcattaattgcatggtaatgatgcagaaacaatagccaacctgcgagagctaggaaagggccgaaaggtaaaggtgcacttaacggcctatttctaagcaaatgcgcgatgaaagtaaaactgctcccagcgagggaagcaatcaaaagcagggccggtagctccatccagccgagccaggctcctaaggccgctagtaatttaaagtcgccatagcctagggcttcacggtgcgttgtcagccaaaatgcccagtaaaggcaccataagactaaatatccacccactgcaccgataacggcatcacttagtgccaacgtttgatcgaataaatggaaaatcaagccaccccatagcaaagaaagcgtgaggttatccggcaatagcaaatgctcaatatcaattgcggttaacgctattaatacccatgtaaagactaatgcagcaagaagcgtatatccggcaggaataatcatgctgataaataatgttaaagccacagtcgctagctcgatcatgggataacggagagagatcttattttggcagtgtcggcattgtgccttaagtagaaaccagctgaatatagggatgttatcatgccatttcagtgagtgatgacaatgtgggcaatacgagcgaggtatacacaagttgaattcatggtgcttattattcttgagcataattggtagtcgatgaatgacgacattaagaaaactaccgatacataggccaagtattactagactaccccaccatagtggagtaaaggtttgtaagctataaagcatatctaacataagtgaaatactctaatgtcgtggattaataaatttggtgtatatctgtatgggctgataaataaaatacagaaataacaaaggcaccattagcgatttaatgcatataaattattctaattgctgatgcctttctcttatttttgactcaaatgtcattaattagttattgggtggcgacaggcttatttgtatagaagttaagataaatgtgagtattcatactatgtatgatagctagaggaatttagttctatggtgccaaattgaaaatattatgatatgtgatgaggtaattaatattattgcgggtatagttattaatatactgtgtttttttagaaaaagttgatttttactatggtaaagttaattgaaaacatgtcaattagtatgctaatagttaatatttagagtaaatatttgttggtttttatcaataaaatatttttatgaataaggctgatgatagctaaaaatttttttgtttcgttaccgtaaaataaagcccgacagatttctgccgggcgataatagtcaatctacctgtggctaatcattagccgcagcgattacatttagatgtttgaataatctggaagaaatcattgcctttatcatcgaccagaataaaagcagggaaatcttcaacttcaattttccagatggcttccatgcctaactctggatactccacacattccagacttttaatactgttttgcgccaataccgccgctggaccaccaatactgccgaggtagaagccgccgtgcttatggcaggcttccgttacctgtttactgcggttgcctttggcgagcatgatcatactgccgccgtgggattgcagtagatccacataggaatccattcggcctgcggtggttggtcctagggaaccagaggcataaccttccggtgtttttgcagggcctgcgtaatagatcgggtgatctttgacatattgcggcaatccctctccatttttcagacgttcttctaattttgcgtgggcaatatcacggccaacaataattgtgccgctcagagataggcgcgtagataccggatactgtgacagctcttttaggatctctttcatcggccggttcagatcgatttttacgactttaccttccgtggcctgacgtaaatgctcggggatatattgccctgggttatgttccagtttttccagccagatgcccttacggttaattttgcctttaatattgcgatcggcggaacaagaaacccccattcctaccgggcaagatgcgccgtggcgtggcaagcggattacacgtacatcatgggcaaaatatttgccaccgaactgcgcgcctaaccctaattcctgagcttctttcagtaattcttcttccagttgaatatcgcggaaagcttgcccatgctcgttaccttcggttggcaaaccatcgtaatatttggtggaagccagttttaccgtcttcagcgtgctttccgcagaggtgccgccgatgacaaacgcgatatggtatggcgggcaggcggcggtacccaaagtgcgcattttctcaactaggaaggctttgagtttgccgggagataatagcgctttagtttcctgatacagataggttttgttcgctgaacccccacccttggtgacgaacaggaatttataatcttccccttctgtgctgtacaggtcgatttgcgcaggcagattgctgccggtattgacctctttatacatgtccagcgcggcgttttgcgagtaacgtaagttatcttcaataaaggtgttgtataccccacgggacaaggcttctgcatcattaccgccggtccagacgcgttggccttttttccctacgataatcgctgtgccggtatcttgacaggttggcaaaatacctttggctgcgatttccgagttacgcaggaattgcagagcaacatacttatcgttttcactggcttcaggatcgtcaagaattgcggcgacttgcttttgatgggcagggcggagtaaaaacgatgcatcgtggaaagcttgttgggcgagtaaggtgagggcttctggttcgactttgagaatatcatgatcttcaaactgcgagacggagacatgattattgctgaccagataatactcggtatcatcttcctttaaagggaaggggtcttgatagtggaacggtttattagacattttctctcacttgcaacatcagttatcgaaactaaggtagatcaagccggtatattttttttaagtagcctttggctccgatcctactatatgtggcgtcagctaagcgatgacgccatctcttttataggggatagatcgcattttccgtatgtatctatgacgtaaccagaaataatctgtcgttgctttaaatcacagtggattatttcttatttttgaaaaaagtcattacaccgccgacaaccaaccccagcacaataccggtcaaaatccactcggttaatgtcatttacatttccttttttattaatttgcaggtgttatttttaaatttttattggttttgtttgcctctcatcagcaataaaccaataaaaatagcctgccgtaacaggctttttaaacgatgttaaggatgctgtgtctggacggtttctacgccatccggttctaccgcctctaacggaggcataatatcttgaatcatctgctcgtcaaaactagggttaagagccggtgaaaggggagaactgaccagactatcgggtattgcaatatgaggcacaggtgcgtcattcacaaagtctgattcatcctgtttcaccgtgcgactgagagaaaccagcgccacgccgcataaagcaaagaaagcatatagaatattgccccctaaaggcgcaatcagcgcaccgaccgccagtgggccgatgctggctcctacgccaaatgacatcagtaaacaggctgccagagagacgcgtctttcaggttcaatcagatcgttagccagcgcgacgactaatgggtaaagggtaaattgcaacatgctaacgatgaatcctagccctagtaacagacgaaaaggaatatgcggccagatagccagcggcagcgcggtaacggcaagtaatatggcattgatacgaatcaataaggttcggttataacgatcggataaccagctcaagggaagctgagccaccagtccagcaaaaattgacagtgccatgaacagacccgtttgctcggttgtcagcgattgcaggctggaataaaccggagcaagcccgtaaaaagaaccgacaatcatgccaataaccaaggttgaggctagaattttcgggatagaatggataaagaatttcaattccattggtgctggtgacatttgctgggcattactacgggttgtcaatgcgataggaaccaggcaaagagcgaagaataaagcgatcaccatcaatgtgctgaggcccaaattgggctgtagcatcagaactacctggcctagcgccataccggcgtaggtagctgccatataaaaaccgaataccgtaccacgttgattcgaggatgactgatcgttcagccagctttctagtaccataaactggcacatcatacacaggccgataattagccttagtatgacccatacgggtatatattctgttaatccgtggctcaatactgccgcggtaatgataccggcgcaggcgacataggcgcgaatatgcccgactctggcgataagaaaatgaccgaccttaccgccgataactaatccgatgtagttagcggcaataatggccccaatcagggctccggacacgttaatagatgttaaacgcagtgagatataggtcgtcagcaggccagaacccaacaacatgagcaccgtcgcggtgtaaagtgggaagaatgcgttcagaatttttttcactatagcgtcctggttttttatcctgaaatgatcgtcggcgtacaggcctaaaagtcggacgtaaaaacagtcagataaagaaattacgtcacgccagcctgctcgggtattacctctctgcaatcaattagatgatttataagcttctttgatattaccagctaagcatgataggtaaagcgttgtccggacaagggctttgaattcgacatgcgaaacgcttcgcatctattggcagaagtgcagcacaaacgaagagaagtgctactatcgccactgaaatattttcatagaataagggggcatgatgaacgaacaacaactgcgtcagctcagcattgacgccggtgagttgctcaaggctcgcggggccagcgtgacctgcgctgaatcttgcaccggcggatggatagcgaaagccttgacggatatcgccggtagctcggcttatttcgatcgcggatttgtgacttacagtaatgaagcaaaacacgatttgctcggcgtagcggaaaccaccctgaatgcgcatggtgcagtcagcgaagaggtcgtgcgtgagatggccgtgggggcattacacgcggcgcaggctgattttgcactctccgttagtgggattgcagggcctgacggcggtactgaatttaagcccgtaggtaccgtctggttcggttttgcaacaaaggctggacagatctcggctgagaagcatgtttttaatggtaatcgcgatgagatacgcttgcaggccactattttcgcgcttcagacgctggttgataaatttctaaaaaaataggcttgatactgtatgattgtacagtataattagcgctaatttcctgcacaaaacaacattcagtggcgacgataagggcgaccttaccttgccagagagggagtaaaaatggctattgatgagaacaaacaaaaggcattagcagcagcactgggccagattgaaaaacaattcggcaaaggcgctattatgcgtcttggcgaagaccgctcaatggatgttgaaacgatttctaccggctcattatcattagatatcgctctgggagccggcggtttgcctatggggcgtattgttgagatctatggccctgaatcgtcaggtaaaactacgctgacgctgcaggtcatcgccgcagcgcagcgcgaaggtaaaacctgtgcctttattgatgccgagcacgcccttgacccaatttacgcgaaaaaactaggcgtagatatcgataatcttctgtgttctcagccagataccggtgagcaagcgttggaaatctgcgatgcgttgactcgttcaggtgcggttgatgtgatcatcgttgactccgtagccgctctgacgccaaaagctgaaattgaaggtgaaattggcgattctcacatgggtcttgctgctcgtatgatgagccaggctatgcgtaagctggcgggtaacctgaaaaatgccaacactttgctgatctttatcaaccagattcgtatgaaaattggtgtgatgttcggtaacccggaaaccactaccggtggtaacgccctgaagttctatgcttccgttcgtttggatattcgccgcatcggtgcggtgaaagaaggcgatgtggtagtgggcagcgaaactcgtgtcaaagtggttaaaaacaaaattgctgcgccgttcaaacaggctgaattccagattctttacggtgaaggcattaacatcaacggtgagttggtggatctgggtgttaaacataagctgattgagaaagccggtgcatggtatagctacaacggtgacaaaatcggtcaaggtaaagctaacgccagtaattatttgaaagaaaacccagctattgcaacagagatcgataagaagctgcgtgaaatgttgctgagcggtgctggtgaacaatcgactgcggcagccggtggttttgccgatgaagccaacgatgagactagcgaagaattttaataggctgaagtgatagccgtatagtcatattaatcctatgacctggcaaaatatcaacccgataagttttgtattgcggtaacgcagcaattagaccaattctggactgagttaactcagtttctggaagcggtgagaatgttagcgctgtcactgccgcaactcgaaatgtaaggggatgggattctctacttgtgattaaaagtaatgaatgacctgttaagccgcgcgatgagattgctctctcaacgagatcatagtgagaccgaactgcgccgcaaacttgcggcgcagtcattttcggtaaaaggcaattggggacgcggaaagaaaaaatccccatctaccactaaacggggtcaaagcctgaataacggcggtggcgataatcacgacgatcgaagcgctaaaaatagcttttatcatcacagctatagttctggtggtagccgcaacgaagaaaaagaggctgacaacgatctccatgatctcactgacggtcatgacgcggctgaggctattgacccaaaagctattgatgaagtcattgcttattgctatcaacacaactggctggatgatgctcgttttgctaccagttatatcaacagccgtagccgcaaagggtatggtgttcagcgcattcgctctgaactgttgcagaaaggcatagaaaaagaacaagcacaaactgcttttgaaataagtgagatcgactggtgtcagctggcaaaagaagtcgctcagcgcaaattcggtgaaaccttacctgttgaatggaaggaaaaggcaaaagttcagcgttatctcctctatcgtggcttctttcaagaagaaattcagtcgatttacaatgattttatcgaatgaatgcacacgggattttacttccctctgaagaaaatttatcttattcccactttttgtttgtgagctgactggtagtcccctttattaaggggggcgctgttggctcgcgagccattcttttagcttgattccgggacaattatgagcaagagcaccgctgagatccgtcaagcgtttctcgatttcttccatagcaagggacaccaggttgtatcaagcagctcattggtccctaataatgacccgacattgttgtttaccaatgccgggatgaaccagttcaaagatgttttcttgggcttggacaagcgggcctatactcgcgccacgacttcccaacgctgtgttcgcgccggtggtaagcataacgatctggaaaacgtcggttataccgcacgtcatcacacgttctttgaaatgttgggtaacttcagctttggcgattacttcaaacatgatgcgattaacttcgcatgggaactgctgaccagcgaaaaatggttcaacctgccgaaagaaaaactgtgggttaccgtttacgaaaccgatgacgaagcctataacatttgggcaaatgacgttggcgtaccgcgtgaacgtatcatccgtatcggcgacaaaggcgcgccttttgcctcggataacttctggcaaatgggtgacaccggcccgtgcggcccgtgcagcgagatcttctacgatcacggcgaccatatctggggtggccctccaggctcaccagaagaagatggcgatcgctacatcgagatctggaacatcgttttcatgcaattcaaccgtcagtcagatggcacaatgttgccgctgcctaaaccatccgtagataccggtatggggttggagcgtattgccgctgtattgcagcacgtgaatactaactatgaaatcgatttgttccgcgatttgattgcggccgttgccgaagtaactggcgctaccgatcttaatagcaaatcactgcgcgtgattgccgatcatatccgctcatgtgcgttcctgatttcagacggtgttattccttcgaatgaaaaccgtggttatgtgctgcgtcgcatcattcgtcgtgctattcgccatggaaatattctgggtgccaaagataccttcttctacaaactggtagcgccattgattgccgttatgggttcagccgctgatgaattgaaacagcagcaggcgatggttgagcaggttctgaaaactgaagaagagcagtttgcacggactctggaacgtggtctggcattgctggatgaagagttgaacaagctgaccggcgacacgctggacggtgaaactgcattccgtctgtatgatacttatggtttcccggttgatttgaccgcggacgtgtgccgtgagcgcaatctgaaggttgatgaggctggttttgagcaggcaatggaagctcaacgccgtcgtgctcgtgaatccagcggttttggtgctgactataacagcctgatccgcgtcgataccgcgagtgaattctctggctatgaccatgtagagcagaaatctaccgttactgcattgttccgcaatggtgaagccgttgacgagattcatgccggtgaagatgccgtggtgatcttgaatcagactccgttctacggtgagtcaggcggtcaggttggcgaccaaggccaactgaaaagcgctatggctgattttatggtctccgacacgcagaaatacggccaggcgattggccacttaggccagttatctcaaggtactttgcgtattaacgatagcgttgatgctattgtagatagcgctcgccgtaatcgtattcgtctgaaccattccgcgacccacttgttgcacgctgcattgcgtaaaatactgggtgagcatgtggctcagaaaggctcattggttaacgataaatacctgcgttttgacttctctcattttgaagccatgaagccggaacaaattcgtcaggttgaagacctggtgaatgcgcagattcgccgcaacctgccaattcaaacggaagttatggagttggacgcagcgaaagaaaaaggcgcaatggctctgttcggcgagaaatatgacgatcaggtgcgcgtattgaccatgggcgacttctcaaccgaactttgcggcggtattcacgccaatcgtaccggtgatattggtctgttccgtattctggctgaatcaggcacggcagcaggtattcgtcgtatcgaagccgtaacgggggaaggtgctattgccttgctgcatcagcaaagtgatctgttacaggatgttgctcacctggtgaagggggatagcaataatctgacagataagattcgggccgtattggatcgcagcaaagcgttggaaagagaattacagcagttgaaagaccagcaggcagcgcaggagagtgcttcattgtcctcctctgcgaaagaagtgaagggcgtaaaactgttggttagcaaactggataacgttgaagcgaaaatgctgcgtaccatggttgacgatctgaagaatcagttgggctctgccattattgttctggcaacgaccgcggacgataaagtgagcctgattgtaggcgtgaccaaagatttgaccaaccgagtcaaagcaggtgagttgattgccgatattgcccagcaggtggggggtaaaggcggtggacgccctgatatggctcaggctggaggttcggatgttcaggctctgcccgccgcgctggctagcgtagaagcgtgggtcgcgtctcggctgtaagcatgcaatgatcgtgtaaaataaatgcgccatacctcaaagaagagtatggcgcttttcaattttcttgtcataggtcggttacaaagttaaacgcaaatttgttcgtgtcgtctaaacttgtattagttagaggcgcgaccaagctacttacattttatgtgggggcgatggcttacgttttcacggtgtatgatggataatggcggggaaactgagagacccgactcttttaatttttcaaggagcaaagaatgcttattctgactcgtcgagttggtgaaacactcatgattggcgatgaggttacggttactgtattaggagttaaaggcaaccaggttcgaattggtgtgaatgctccgaaagaagtttctgttcaccgtgaagaaatctaccaacgtattcaagcagagaagtctcaaccgacgacttactgatattgaagcagcgtctcgtggaatgcgagacgctgctgctctcccccaaattctattccctgcatcatttctcactcgctcatggctattttctcgcttttctcccaagatttaactcgcctcagtaatattccttcaattcttttacaacgctatttcgcagacatccttatctcgcctgttgataaaatactcttttcgatgccaaattgcgcatcttggctgtgaattgtgcaagtaaacgtttgttgggaaaaattgtttgacttataagtgcaggaaagtaatatgtgcgccacgcagtgccgatgagcttctttaaaagcaagttaggcacaattcgaaagaagcgtatggtgaggtggccgagaggctgaaggcgctcccctgctaagggagtatacggtcaaaagctgtatcgagggttcgaatccctccctcaccgccatttactatgcacccatagctcagctggatagagtactcggctacgaaccgagcggtcggaagttcgaatcttcctgggtgcaccatattttgcagtatggtgaagtagttaaatgactgtcagatagtttcagagatttatttgcacccatagctcagctggatagagtactcggctacgaaccgagcggtcggaagttcgaatcttcctgggtgcaccatctttgttgttatagtttcactcggtgaaacgcttcgcagtaaaaaatcaaacgcacccatagctcagctggatagagtactcggctacgaaccgagcggtcggaagttcgaatcttcctgggtgcaccattttaagaaacctcgctgcggcggggttttctgctttctggctatttgaaatagcatcctgcctgatttggtcagtgagaccccgcgagtgccagtagaacgccactgacttctttttttccgctatctgaatttcgcctgcctatgaaaaatatcaagatgggtcgatgaggttataaatattcatcaaatctatatctcatcacagtgcttgtactggctaatgaattcccatccagttgattttattacgctcatctaatgaccatctttagccaaaaaacactttttctgattaaatacagatggttatacagtaagcgacaatttaatgagtttgcgataaagtagcttttcctttcctcaatgatcctgggataaagatgtacgatcgctatgaaggcctaatctttgatatggatggtacgattttggataccgaatccacccatcgacaggcttggcggaaggtgttgatgcctcacggtattcaatttgatgagcaagctatggtggcgctcaacggctctccaacctggcgaattgccgagatgattattcataatcatcggttgaagttagatcctcatctgttagccgctgagaaaacggcagcggtgaaggcgatgctgttggataacgtaaagccgctcccgctcattgacgtggttaaggcttatcatggccgcagacctatggctgtgggaaccggaagcgagcacagcatggctgaggcgcttttacgacatcttggccttcgggattacttcgatgtcatcgtcggtgccgatgacgttacccggcataagccggagccagacacctttttgcgctgtgccgaattgctcggcgtggcgccggagcgctgtgtcgtgttcgaagatgctgatttcggcgtagaagcggcaaagcgggcgaagatggacgtggtggatgtgcgtctgctgtgagtagcacgctggctgtagcatcgttattcggtagcagttttcttagcgcgacgctcttacctggaagttccgaaattctattagtgaccttgctaactgcgggcagtgcgcctgcggtgatattagtgttatctgcaaccgtaggtaatacgctgggtggcttaacaaatgtagttataggccgcctgttaccggcgttaaaaccgcagcgcgggctggatatgacgttgggctggctccaacgctttggtccagccgctctcttgctgagttggttaccggtggtaggcgatttgatgtgtgtgttggcaggctggctgcgtatgccctgggctctggtggttttttttctgtgtgtgggaaaagctgtgcgttacatcgttattaccgtgttaacgctggaaggaatcgcctggtggcaataaagatgtgatgacttcacatagtcacattgacgtagtttcagtatgcttacgggctatggtttttaagagcgggaggtcgatttgatcccggacgtatcacaggcgctttcttggttggaagcgcatcctaatgcattaaaaggaatccgccgcggcattgagcgggaaacattgcgtgtgaccgctgatggccaactggctgcgacgggtcaccctgagtcactcggggcggcgttgacacatcaatggatcacgactgattttgccgaagctttgctggagtttatcactccggtagacggcgatatcgatcatttgctggcttttttgcgtgatattcatcgttacactgcgcgtaaacttggcgatgagcgcatgtggccccttagcatgccgtgctttatcggcgccgagcaggatatcgaactggctaaatacggttcctccaacgttggacgcttcaagacgctgtaccgtgaagggttgaaaaaccgctatggcgcgctgatgcaaaccatttccggcgtacattacaacttctcactgcctattgagttttggcaggcgtgggcgggtgtggaagacgagcaaagtggtaaagaagagatctctgccggttatttccgactgatccgtaactactatcgctttggctgggtgattccgtatctgtttggtgcttcgccagcgatttgctcttcattcctgcaaggacgtgagaccgcattgccttttgagcgcaatgataacggtatgtgctatttaccttatgccacttctttacgcctgagcgatttgggttacaccaataaatcacagagtaatttaggcattacttttaatgacctgaatacctatattgatggattgaagcgtgctatccatacgccatcggaagagtatgcggcgctggggctgaaagagggcgatcgctacctacagctcaatagcaatgtactgcaaatcgaaaatgagctgtatgctccgattcgacccaaacgcgtcactcaatcaggtgagtcaccttctgacgcgttgctgcgcggcgggatcgaatatatcgaagtgcgctcgctggatatcaatccgttctccccaattggtgttgatgcggtacaggctcgtttcctcgatctatttctgatctggtgcgtgctggctgatgcgcctgaaatgagcagcgatgagctactttgtacgcgtaaaaactggaatcgtgtgattctggaagggcgtaaaccgggtcagactattggtattggctgcgatagcactcgtgagcctttagataaagtcggtaaagcgctgtttgacgacttgcgccgggtggcagaagtgctggacggcaaagacagtcgggcttatcaggatgtatgtgatgagctagttgcttccttcgataatccggaactgacgttctctgctcgtattttacaggcaatgaaagcggaaggaatcggtggtgtcgggctggatctggctgaacgttatcgcgaaatgttacgcagtgagccgttggaaatattgactgaagaacagctttcagctgaacgtgaccgttcttggattcgtcaaggtgagctggaacgtagtgatgaactaagctttgaagagtatctggcgatacacgcaggtcgctagaaaaagaaaaggccacaatcaatgtggccaaattaacatctctgtatacagggatgatgataacaaatgcgcgtctttcacatattaagacggcggtgatttaaaaaagtttcattgggttcgaaaaaaaattcttctgcgagaaataattttttttgaggaggtaacaagatgccattattggacagttttacagttgaccacaccattatgaaagcaccggccgttcgcgttgctaagacgatgaaaacccctcacggcgatgcaatcaccgtgtttgatttacgtttctgcgtgccgaataaagaagttttgccggagaaaggtattcatacgctggagcatttattcgcaggttttatgcgtgatcatctgaatggtcagggtgtggaaattattgatatctcaccaatgggctgccgtaccggtttctatatgagcctgattggcacacctgacgagcagcgtgtggcggaagcgtggaaagcggcgatggctgatgtactgaaagtcactgaccagcgtaaaattcctgagctgaatgaatatcagtgtgggacttaccaaatgcattcgctggaagaagcgcaggacattgccaaaagcatcatcgagcgtggtgtgcgggtaaatcataacgatgagttggcattaccgaaagagaaactgactgaactgcacatctagcatcgttgatatgttggaaaataaatatcctccggcatagccggaggtttttcatatgcgcctataaggctctgttgccagccgcgccctaacaggcgcatcgcgatctgacatttgcatttatggattacttacggcccgtaaacgggctgcccggataggggatcgagagttgctcacccattttatcctcttccaactggtgctttatgtattcttgtatcctggctgtatttttcccaaccgtatcaacgtaataccctcgacaccagaactccctgttacggtatttgaacttcaaatcgccaaactgctcataaagcatcaggctgctctttcctttcaggtatcccataaaacccgacacactcattttgggcgggatttccagaagcatatggatgtgatccacacagcattctgcttccagaatattcacgtttttccattcgcacagctttcttaagatactgcctatcgctttgcgcttttccccgtagaacacctttcttcggtacttcggcgcaaaaaccatgtgatatctacagttccatcgcgtgtgcgctaagctcttttcgtccctcatagggacccccttttgatttcttgttgaacatttgcagttgccagaccgcaaactgttttaacaaatcaaaggggtttttataactggctcaaagctgaaagctttaccgaacctccagcctggctggaggttttctgtgcacaacaaaaaaagacgcgagagcgtcttttttattgggcgcgtatttatcgcgcgcgagttgctcgatctgcggctattactgcggattaagcggtgaatgcggatgatcgatcggggtaactctgacctgtttaatcatattgtcctgtacgtccaatacttcgatttcgtaatggccgatgcgcacttgagcgttaatctcaggaatatcttctagggtttcaagcagcatgccattaatggtgcgggcgtcgaccggcagcgaccagttaaaggccttattcagttcccggacattggcggtgccgtcgataattaccgagccatcgctttgtggattcacttcttccgccaacgtaggggacattgacgtagtgaaatctccgacaatctcttccagaatatcttctaccgtaaccagtccttgaatatcgccgtattcatcgacaatcatgccgactttttctttattgcgctggaatttgaccagttgaacgttcagcggtgtgccttctggaataaagtagatttcatccgccgcgcgcagcaggttttctttgttgaactcttttttctcggtcatcagccggtaggcttcacgcactcgtagcatcccaatcgcgtcatccagcgattggcgatacagcacaattcgaccgtgaggggaatgagttaactggcgcataatggacttccaatcatcattgatatcaataccaaccacttcattgcgcggcaccataatgtcgctgactgtgactttttccagatccagcaccgagatcaacatgtcctgattacgacgggaaatttgtgagtgtgattcattcacgatactgcgtaattcgtctttactcactgcatcactgacgtgcacattgcctttgataccgcacaggcgcatcaacaggcgggtaatgctgttcagtaaccagaccagcggcagcatgatcttctgcaaaggagccaatagcatgctgctagggaaggcgacgcgctctggatagagcgcagcgatggttttcggcatcacttcagcaaaaatcagcaccacaaaggtcaatacgccagtggcaactgccacgcctgcgttaccgtacagtcgaattccaactatggtggccagcgccgatgcgagaatgttaaccagattattgccgataagaaccaggctaatcagacgatccgggcggcgtaatagtttttccacgcggcgggcagaacggtttccttgcttggccaaatggcgcaggcggtagcggtttagcgtcatcatgccggtttctgaggcggagaagtaagccgataccacgaccataatgatcagaatgatgataagtgtactggtagagacctggtccaacgcaatattccttatagcgatagatgaaggctccagtcagggtaacaggagccataggttgggcgggggagtgtcgttagccgatcatgatctcttgcagcaggcggctgccgaaataggctagagtcagtaagaatgctccggcaaagctgaaccagaccacgcggcggccgcgccacccttcgtgataatgaccccacaatagaataatgtagacaaaccacgccataatcgacagcacggctttatggacattctctttgctgaacaaattatccatatataacaaaccggtgcagagcgttagcgtcagcagcactacgccaatttgcgtaatgtgaaacatttttcgctcaatgctcatcagtggcggcatatcggcggtgaatgtcagttttttattcttcagtagataatccagccaagctagctgcatggcgtacaatgcggcaataatcagcgtggcataacccaatagcgccagcccaatatggataaataacgccgggctgccttccagatgggtaatgaattcgcctggcatcagactggcgagagccaaattgatcatggcaaagctgtaaacgattggcagcaggaaccagccgcgcccacgagaggccacgaatgtcatgattgagcagatcatcaaaccgacaatagagccgatattcagcaaagtcaggttttgaccctcgccaacatcaaatatttgatgtttcaatgcgataccatggcaaaccagcgctactacggcagaaaccagggctagccgtcggtaagcgctgctcttcctcaccaaactgggaataatcagtcccagactaagtaaataggcaactagagccaaaatagagaacacgggcatagcggttaataggcatcggctgagtgaattggataaccagtataacgttagcagcgtcatgctccaaccgttctcctacgtgaaggcagagatcgcgcgcgcttcgtgttataatcccgccattgtgtcgcccgggcggcctgtttccacgttgagcatgagacgatgtttgagaacttaaccgatcgattatcgcgcacactgcgcaatatcagcggccgtggccggctgacagaagaaaatattaaagaaaccctgcgtgaagtccgcatggcattgcttgaggccgacgttgccttgccggtggttcgtgactttatcaaccgggttaaagagcgtgcggttggccatgaggtcaataaaagccttacgccgggccaagaatttgtaaaaattgttaagaatgagctgatcggcgccatgggcgagatcaataacgaactcaatctggcagcccaaccgccggcggtcgttttgatggccggtctgcaaggggcaggtaaaacaaccagcgtagctaagctgggtaagttcctgagagaaaagcagaagaaaaaagtgctggtggtttctgccgacgtttatcgccctgcggcgatcaaacagttggaaacgctggcgcagcaggttggcgttgaattcttcccgtcggacgtgcaggaaaaaccgattgatatcgttaatcgggctttacagcaggcgaaactgaaattctttgatgtgctgatcgtcgatactgccggtcgtttgcacgttgatgaagccatgatggacgaaatcaaacagattcatgccgcgattaatccggtagaaacgctgtttgttgtcgatgccatgaccggtcaggatgctgccaacacggcgaaagcgtttaacgaagcgctgccgttgaccggcgtggtgttgaccaaggtagacggcgatgctcgtggcggtgccgcgctgtcgattcgtcatatcaccggtaagccgattaaattcctcggtgtgggtgagaaaaccgaagcgttggagccattccatccggaccgcgttgcttcacgtattctggggatgggcgacgttctctccctgatcgaagacattgaaagcaaagttgaccgtgcacaggcggaaaaattagcgaccaagctgaagaaaggcgacgggtttgacctgaacgactttctggatcagttaaaacaaatgcgcaatatgggtggcatggccagcatgttgagcaagatgcccggtgcaggccagttgcctgacaacgtgaaatcgcaaatggatgacaaagtgacggtgcggatggaagccatcatcaactcgatgacgctgaaagaacgtgccaagccggaaatcatcaaaggttctcgcaagcgccgtatcgcagcgggttccggtatgcaggttcaggatgtgaaccgcctgctgaaacagttcgatgaaatgcagcgcatgatgaagaaaatgaaaaacggcggtctggccaaaatgatgcgtggcatgaaaggtatgatgccaccgggtttccctggccgttaatgccctcatttgccctgataagcattcaggcgaaaagggttatcaatttcccgccagaaacggcggtaaacgatgaaaattggcctcattataaaagtagcggacaggaatctacgctttagattgctttttgcgccaaaatgagtaaaattttcgggctttttatattgcaactgaaccccgttccccgatggggttcagttgttttattaactaaagaggatgttatggtaacaattcgtttggctcgtggcggcgctaaaaagcgtccgttctatcaagtagtagtgaccgacagccgtaatgctcgtgacggtcgtttcatcgaacgtgtaggcttctttaacccgatcgcatctggtcaggctgaagcactgcgtttggacctggatcgtatcgaacattggatcggcctgggcgcaactgtttctgatcgcgtttctgcgctgatcaaagacgctaagaaagcagcttaatctgtcgcggtggtggttattatgagcaaacaactcaatccagtggttcccgagcagccgattgttcttggcaaaatgggttcaacttacggcattcgcggttggctcagagtattttcatccaccgagaacgccgaaagcatttttgactatcagccgtggtttatccagcaggccggtaagtggcagcacgtcgagttggaagactggaagcgccacagtcaagatttgatcatcaaagtcaaaggtgttgacgatcgggatgctgcgaatctgctaactaattgcgaaattatggtggattcgaaacaattgccagaactagaaggtgatgattactactggaaagaccttatgggctgtcaggtagtaaccacaaccggttacgaactgggtaaaatcatcgatatgatggaaaccggttctaacgatgtcatggtagtcaaagcaaacctgaaagatgcattcggtatgaaggagcggttggtcccgtttcttcatgggcaggttatcaagaatgtcgatctcactgctcaacgtgttgaagtagattgggatcctggtttttgacctctgaattaaacggcaacggcgagtggaacaaaacgatgtggattggtgttatcagcctgtttcctgagatgttccgcgcaataaccgattttggggtaactggccgggcagtaaaaaatggcctgctgagcgtgcagtgttggagtcctcgtgactttacctacgatcggcatcgtaccgtggatgaccgcccatacggcggtggcccgggaatgctgatgatggtgcaaccgttaagggaagccattcatgcagcaaaagcggcggcaggcgagggagcaaaggtgatttatctgtcacctcaaggacgcaaactggaccaacagggtgtctgcgaactggcaaccaaccagaagatgattttggtgtgtggtcggtacgaaggtattgatgagcgcgtaatcaaaaccgaaattgatgaagaatggtcaattggggattacgttctcagcggcggtgagctgccggcaatgacgctgattgattctgtatcccgctttataccgggcgtactgggtcatcaggcctcggctgaggaagattccttcgctgatggattgctggattgcccgcactatacccgtccggaggtgttggaaggcatggaagttccgccagtattactgtcgggcaaccacgctgagattcgtcgctggcgcttaaagcagtcgctgggccgtacctggcttagaagacctgaacttctagaaagcctagctctgactgacgagcaaatggtgttgctggctgagttccgaaaggagcaagaggcctgagcgacagaactatgaaaggaacgtttcgccgcgtgcaaacgatcctgatatatcagtttacctagggtaagagacttattatgagcaatattatcaagcaaatcgaacaagagcagatgaagcaagacgtacctgcattccgtccgggtgattccgtggaagttaaggtatgggtcgttgaaggtgctaaaaaacgtctgcaggcattcgagggcgtggttatcgcaatccgtaaccgcggtctgcactctgcattcactgttcgtaaaatttccaacggcgaaggtgttgagcgtgtattccaaactcactccccagtaatcgacagcattactgttaagcgccgtggtgccgttcgtcaagcgaaactgtactacctgcgtgagcgtactggtaagtctgctcgtatcaaagagcgtcttaaccgtattaactaagatacagctcaggcttcatccaatagttaatagttatcaaggggttggccattggctgacccctttttttatctgtaaagtctctcaaagctcccgtttacttttcttattgatataaactgccattccgtctacctcagttattttattgatattttttgcgcaccgcctcgaataaaccaagtaaaaactttgataataaagctagctctggctaggctgcatctcattcaattgaatgctaaagccaataagaggaagaaaatgctgcaaggaaaaagagctgtggtgaccggtggtgggcgcgattttggtcaggctgtttcagtatggttagcgcgggaaggtgctgaagtcgttttatgcagtcgggttatcgcgcaggcgcaggcaaccgtggatattattcgcgccgaaggtggtattgccgaggcctatgagtgcgatatttccgatatgaattcagtccggcagttttctcacgggttactaaaacatgaaaagccgatagatatcctcttgctaagcgcggctcaatggctggaaggggatttacaaacaggcggtggcgatgaggatattattagcaccattaatgccggtttaacgggctctattttactgaccaaagcgctactaccgaggatgaatagagagcagggcagcgatattatcgcgatggtttctgtctgcggcgtgccgaatttcactcaatctaacgcccatcccgcatttttcgccgctaagcagggttttagcggcttttgccatactatttcccagagcttagctgctgaaaatatccgtttgaccgcgctgtatcccccagattttgaaacccttggttttgacgaagatatttctcatcataatcagacaaaccaacgcttgttaaccggccaatctatttggcaaaccgttaaatttgtcgtgactcagccgcgcagttgccacatcaacgctattcattttcagggaccgagccgcgaaccgttgggataaatggatgagttagttataggaaggagagcgtcagtgaggaaaatcttagcgtgactgcgccacgctaagaatattcagatgattacagaccgtaaaccagcgtgactgaggttgtcgtgtcggtatttttgggggcgctggccggaggcttggtgttgtaggtaacaacgtaagccagacgcagagcaaaactcttattgattgctacgtttaacgcagtttcagagttcagcgtagtctcttcgttggctaaagctgaaacgccttcgctaaacacggtgttatcggtcaactgataggtatagttggtgccagcataggccaaggctttagttgcgcggccaccgcgatagaattcgtcatggcgaacacctggaccgaattccacgcgcagattatgtaaagcgccggtaagaatctgccgaccataaccggttgtgagtacggagcgagaatcgtagccgttataacgatcgttcaaccagctggcttgaccgaacagatagttgcggtcggttagattatagcgagtacgtccacctaactgatagcgctctgaagatcttacctcattggagctggtgtttcttgcggagccccaaaggctataagccgtattgggttggaaccaggtcaacgtggagttggctgtcagggttgagttattagtattccccgattgagcgttataacccgcttcgacattaccgacaaaactgtgtttagcagtagcaggatcatcaagtgcggtaaaaacggtggcatcggcaaaagctgatgcgctgaacatagacactgctaacgtactgaaataaaaaggtaacgccctggtatgacgcaaagagaacataatgcttccatggtaaaaaagaataagattgataatgcggccggcattgtatcaacttgcgatcaaagttattcataagatattgccaatcttcaaataaattataataaacgcatttcacatatgagattattattagcaattattttttatgacaggacgcagggcagaaaagtcggcaataaaccatattttgtctgtgagaattggataaaatatcaggggatagggtaataaatttaattttttggctttatccctcagtgttaattgagtttcctgacttaagttaatttttatgggtggaggggcaatttcttaccccttgatgatttttaaacggattttattacataaaggtatttaccagcagataaccagtcatacaggagcacaccacgccgattaaaccggggatgataaaactatggttaatgataaagcggccaatttttgtcgtaccggagcggtcaaaaccgatgcaagccagatcgctgggataagtcggtaatacaaagtaaccgtaggccgcagggaagaaggcgatcagcattttaggatcgacacctaattgcaaccccataggagcaatagctgccaatgccgccgcctgactgtttaccagcttagaaaccaaaaacagtacaatggcataggtccacggctggctttttaccacgtcttccagtaccagttttaattcccccatatgtgcctggaaaaaagtatcactcatccaggcgacgccgaataccgagaaaatcgctaccatgcccgctttgaataccgcaccgtttgaaatatcgctcggtttaactttacagcccatcagaatcactgcaccggcaattaacatcatcatctgaataaccagattcatagagagcggtttaagtacgcctttaacttcataagccggacgtaaatcgccaaatgcgccgagtaatacgacgatggcgatggcactaaagaatatccaggttgaccagtaagcctgtttcgggaaaacctgattcagcagcgtatcagtgctgccatatatgaaggcacgttgctccggatcttttattcgagcctgaaaatcagggtctttatccaaatctttaccgcggcgtaggctccacagcgctgcggctaacacgcccactaacgaagcgggaacagaaatcgccaaaatttccagtatgctataagcatgcccgatgccgtgagccgcgccaataatagaaaccagagaaactacggccactgataccggcgatgcggtaatggccatttgcgaagcaacggaagcgacggccattgggcgctcgggacggattcctttcttgagggcgatatctgaaataatcgggaacatggtataaaccacatgtccggtgccgcataaaaaggttaatgaccaggttgtgaacggagctaatagcgttatatgttgcggatgccgacgtaataagcgttcggcaaactgcatcatgatatttaatccgccagcggtttgtaatactgaagcacagccaataaccgctaatatcgtcagcatgacatcaaccggtggtttacccggttcaaggccaaatataaaggttaaaataaataagccgatgccactaataaggcctagccccatgcccccaaagcgagtgccgattaataggcacagaataataattgcaaattgcagtgttatcataacgatcccttgtatttttctgtatgaaaaaagcttgttagccaatcctgtttttaaaatgtcatatttttctttgctataaccatcaaagcacagatcgctaaagcaaaaacttggctaatatcaagagagcgcgtcttatttattgaatgaattaaaaccgagaggaagatctgttttttataatttttagtcgagaaaaaagaaaggaataatattggttatccctgatggttattcatgtaaaacgattgttttaatattgttcgatatattgttgggctgggttttaattagctatttaattaatccagatttgctgaagtatttcggcatctttaactgaatcacagctggcagggaaattatcgccccgttcaaagtgaattttcaagcgggcaggctggcaaagatcctgttgcccagcatgataacctgataggtaatagtcgcgattaatgtgtggattgccataccattcggctagagtctcattatctctgacaatcaacccgccctgagcatcactgaatccgatctcataccagctcgtcgggtctttgacttcatcattagggtcaagagaatggctacagccgctaagtaacagcgcaccgatcatcatctgcttatatttcatggtgaagttcttctgcaaccgatttgcgatagctgttttagataatgatatcaggctatgcctaacttctctttaagtggttttagataacgtcggctaaccgggatgtgctttccggtgcgagtgacaacttctgctgaaccgttatccataagctgtatttcgcctagctgttccgtgttcaccatatattgacggtgacagcgaataaaaggcgttttttcttccagcgttttcaacgagagctgggtataacctgattgcaccatgcccacaacgtgcacaccgctaagctctgaactgagatattcgacctcttctattttcaaaagaaagatacgattatgcccggagcagggaatgtgacgcagcatcggttcggtgattttgtgtaaattattatttacagttaggcctcgacgcaggcgaataagtgtcttggccaatcgttgctggtcgaggggttttagcagatagtcgaaagcatgttcttcgaaggcgcggacagcatactcgtcaaaggcagtgacaaacacaatgtggggcatgctctctgggttcagcatgctcgctagctccagtccgttgatgcgaggcatttgaatatcgagaaatacgacatccggctggagccgctgaatcgcggggatagcttctatagcgttactgcattcagcgataacctcaatgtcttgctcttcacttaatcgttcgcgtaaatcttcgcgcgcaggttgttcatcatcaacgatgatcgctctcagcatacttcctccacaaatttttctcattttatcatggtgatttgctgcttggagaaccatctgtacaaactgcgacatcccgcaaaagttagccagattgtgggtgtaaagtttgcggtaattatttatttacagatatggattgaaaagtttacacggcgtgatattgtggaactcagaaacgacaccgcacatgaaacgatactcgcttaacagaggtaggtaggaaatatgatcatgcaaaaagatgcgctcaataacgttcatatcagtgctgaacaaatactgattacgccggaagaactgaagaatcggttcccgttgagtgaaaatgatcaatatgcaattgcttcgtcgcgcaaaaccattgctgatatcgttcaggggcgcgacccgcgtttgttagtggtttgcggtccttgttccattcacgatgtggatgctgcgttggattatgctcgtcgtctgaaactcctctctgctgaattgagcgatagcctgtacatcgttatgcgcgtttattttgaaaaaccaagaactaccgtaggttggaaaggtttgatcaacgatccgtacatggatggttcttttgatatggaagcaggcctgcatattgctcgacgcctgttgctggatttagtgggtatgggattgccattggcgaccgaagcacttgacccaaatagcccgcaatacctcggcgatctgttcagttggtcggccattggtgcccgtaccacggaatcccagactcaccgtgaaatggcatctggcctatctatgcctgtaggttttaaaaacggaactgacggcagcttaggtacggcgattaatgcgatgcgcgccgcatctatgccacatcgttttgttggcattaatcagtctgggcaggtgtgcttgttgcaaactcagggcaacccggacggtcatgtgattctgcgcggcggtaaaacgcctaactacagtgcgcaagatgtggcgcagtgtgaaaaacagatgcaggacgcgggactcactccatccttgatgatagattgcagccatggtaattcgaataaagatttccgtcgccagaccgcagtagctgaatcggttgttgagcagatcaaagcaggtaatcgttcgattatcggtgtgatgctggaaagtcatctgcatgaggggaaccagtcatctgagcaaccgcgggaaacgatgcattacggtgtttccgtgaccgatgcctgcattaactgggaaacaacggaaactctgttacgttcgatgcataaagaattaagcccggcgctggcggcgcggactgtagaggaatagtcgttatggtggctgaattgaccgcattgcgcgatcaaattgatgaagtggataaagcgttgctggacttgctggcgaaacgcctgagtctggtggctgaggtgggcgaagtcaaaagccgctttggtttgccgatttatgtgccggatcgtgagtctgccatgctggcgtcacgccgcaaagaggccgaggcgctgggcgttccccccgatttgattgaagatgttttacgccgggtgatgcgtgagtcatatgccagcgagaatgacaaaggctttaaaaccctgaacccacagctgcgccccgtcgtgattatcggtggtaaagggcagatggggcagttattcggtcggatgttattgctttcgggctatcaggtaaaaacgctggagcaggaagactggccgcaggcggaatcgattctggccgatgcaggaatggtgatcgtcagcgtacctatccatgcaacagaagaagtgattgctagcttacctaagctaccgacagactgcattttgctggatttggcatcggtgaagaatcgtccactgcaatcgatgctggcagcgcatgaagggccggttgttggtctgcatccgatgtttggtccggatgtggggagtctggcgaagcaggtcgtggtgtattgtgatggtcgtcagcctgaagcttaccaatggttattggaacagttgcaggtatggggcgcgcggctgcatcgtatcagcgcggttgaacatgaccagaatatggcctttatccaggcgctacgccactttgccacttttgcctatggtctgcatttggcggaagaaaatgttcagcttgaacagcttttggctctgtcctcgccgatttaccggttggagctggcgatggtcgggcgactgtttgctcaggatccgcagttgtacgcagatattattatgtcgtcggaagataacctggcgctgattaaacgttactaccagcggtttggtgatgcgattaagctattagaacagagtgacaagcaggggtttgtttccagcttccagaaggtggaacattggttcggtgattatgctgaacgcttcctgctggaaagtcgctctttgctgcgccaagcaaatgacaatcggcagtaatcattaatatttatgctgttagccagtaaaaaagtcatcccagacgatcgggatgactttttttatgagcaaaaataggtagcgatcggcgattaacttgggttaaccggcaccacgttttcactcggatagcagcccaacacttttagtgaacgggttagcagcgtcaaatcgctgagcgccttttgcatcgcttcggaacgcaggttagcctgcacatcaatataaaacatttcttcccacggattcccgttgattggccgagattctagcttggtcataatgatgccgtgttctttcaagaccagaagagcttctactaacgcccctgattgttggccagtagccataatcagcgtagttttagctggaatctgctcagaaacatcaatagctttacgcgccagcacgatgaaacgagtgatgttttgctgctgatttgccaaatagtattccagtacctgcaaaccatagagcgcgccaccggcttcgctgcccaatgcggcggcttttggggaatttagctgtgcgactttttccattgcggcggcggtgctttcgcaatattcgattttccagtgcgggaaacggttaatgaactgactacattgttggaaaggctgcgggtggctgtaaaccgtttcaatctgacttaaatcggtctccgcagccgtcagaatgcagtgctcgatcgggttggttaattctccgactatcgacaggctagtatgttgcagcagatcgtaaacatcattgatagagcctgaactggtgttttcgatcggtaaaatcgcgtaatccgcctgaccggtttctacttgagtaaagatatcctggaatttcaggcagccgcattcgatcaggttatcaaaatgacgggcggcgtattgacgtgcggccaaatgagagtaagaaccttttgggccaagaaatgcgatgcgcgctgaatgagcggtagtttggttcaactggtgttgcagcaatgtctgttgggtcaatactgagtcttcaataatcagctggaacagacgggtgatataaaatccgtcgagatcgtaaggtttagcagcagtaatcaaagcctgcagtaaatccttctcacgttctttatcacggatcggacgatggctgtgttgcttggctcgagccacttcgattgccaactcgcggcgttctgccagtaacgccaacagctttaagtctaaagcgctgatacgttctcgtagcaccagtaacggattgtctgtcatagggtcagccttattatttttgccaaatgatttatgcataaaaaaagcctcccggttgggaggcttgtttgttcgtcttcgcattctttatcacacgacgaaacgcctcccaatcaggggaaggtaaaaaagaatgcgaagaaaaacggtttgtagctcatgtgatggttgatggcctaatagtcgcgaatggagttaacttaactgccgccagttatggcgtcaataaaaaacgcgcccgaaggcgcgttagatcctcaataagatggttaacccgttactcttcttgctcaggctcctctatcagattgacatttttgatactagcggcggtacgttttgcctcacctttgtgctgaactttgtttagttgtcgttctaatttcgcgatcagctcgttgattgcggcatacatatcatcgtgcttggcactggctaccagagggccgtttggcgtacctatggtcgcatcaacaacaaatccttcagggtctttagacagcacgatatgcggatttattagctgagcttgccacttatccagtttggttagacggtcttcaacatgcttacgaattgcaggggtgatatccatttgtttgctagtaatattgactgcggtcatatggcttacctcgttgtcttctccgtcttggataacttcagcatacctctcttttcggtaaatagaatgatctaaatcacattttcttgtcactttttgcaaaggcgacctgaactgtgagccagtattaggaaagtgatttaagagcttgaatcatcggaaaaaatgtcgcaatatcgataagatcggccagcgatattggagccgaaattctgcttttacccctctccctcaatggcttagtccccccttaacctttcagatccagagcgggtcgggttttgtatgctacccgtgactcaaattaccgcgcaggtttccctatattgggaaccgggagaaagtacgttttacagattaaggaaaggagggcgttcaattttgcgactaacagaaacaaaaacggcagccgaagctaccgttgttttgtctcattggctcacgccagtgtagccatcccactatgcagggttggctgcaatcactttactgactttatctgcctgcgcattcaactgaatttgcttgtaggcattttccattaacggcagtgcatcgcgagtcgctttggtgtctgggtaattgcgcatcatttgctcaacacggttaattaccgcaacgtaagcaccgcgcttagtgtagtatttagcaacggccagttcatgcttggccagtcgatctttcaagaacaccaggcgtttttgggcatccgtagcatactgactgttcggatagctttgaattaactggttaaaatcgcggaaagcagctcttgcatgctgagggtcgcggtctgaacggtcaatcccgaagaagccttgtaatgcactgtcatccagagccatgtcagtcagaccacgcatatataatacgtaatcaatgttaggatgtgtgggattgaggcgcataaagcgatcgatcgaggcctgagccagcggcaaatcggcagatttataataagcataaatcaaatccaactgcacttgctgggagtaaggcccgaaaggatagcgattatctaacgcttctagttgcgtaatagctcccttaaagttaccgtcctgcagtttttgctgcgcggtagcatagagctcagaaggcgggttgtcgggaaccacgtccttgttactggagcaaccggtcagcaccaggctcaacgtggcggcagccaccagatatttcatacgcgtcatgacgttttgattatcctcgaagtgttattccgggagactgtccgttaagctcccgacaaagatctagatacaatagcacattatattaaacggcatcgccgtcaaaacccaacgttaacgaagaagctgcatatggcacaacaagtacaactcagcgcaacggtggccgaatctcaactcggtcaacgtttagatcaggctttggccgaattgttccctgattattcacgatctcgcataaaagagtggattttggataatagggtctcggtcgatggtaagacaattaataagccaaaagaaaaagtgttgggtggcgagatcgtcgcgattgacgctcaaatagaagaagaagcccgctgggagccgcaggaaatcccattggatatcgtgtacgaagatagcgatattctggttatcaacaaaccgcgcggcttggtggtacaccccggtgcaggtaatcctgatggcacggtattaaatgcgttattgcattattaccctgaaatcgtggatgttccccgcgctggcatcgttcatcgtctggataaagacaccacaggtttgatggtcgtggcgaaaaccgtcccggctcagactcgtttggttgaagcgcttcaggcgcgcgaaatcactcgtgaatacgaagccgttgccattggtaaaatgacggcgggcggtctggttgatgagccgatttctcgtcactcgaccaaacgcactcacatggcggttcaccctatgggtaaacctgcggtgactcattaccgcattatggaacatttccgcgcgcatactcgcttgcgtctgcgtctggaaacgggccgtactcaccagatccgcgtgcatatgtcgcatattaaccatccgctggtgggcgatcagctttacggtggccgtccgcgtccgccaagaggcgcatcggataatttcattgccgtgctgcgtggtttcgatcgtcaggcactgcatgccaccatgctgcgtttgtatcatccaatcagtggcgttcagatggaatggcatgccgctctgccggaagacatgattgagctgatcaccgctttgaaagccgatactttagaatttaaagatcagatggattggtaatgaagccgctgattctgccgcaatggccacagccagccagcgttaagtcgtgcagcaccacccgcagcggtggtgttagcgtgccgccttatgattctctgaatttaggggcgcacgtaggcgataacccggcggatgtggagcagaatcgccagcaattaattacgctggcggcgctgccacaggctccgcaatggctggaacaggtgcatggcacgcgagttttacgcctgaacggcgagcccatcgcggatatccaggccgatgcggtatacagcaacgtgcctgggcaggtttgcgcggtgatgactgccgactgtctgccggtcttgttctgttcgctgacgggagacgaagttgcggcggctcatgccggctggcgtggcttatgtgccggcgttcttgaacagactttggcagaattcagcgcaaaaccttcttctattattgcctggttaggcccggcgattgggcctcggcaatttgaagtgggagcagaagtaaaacaggcattcgttagcgcagacccccaagctgcgctggcgtttactccgtttggtgacaaatatctggcagatatttacctgctagcccgccagcggctggcgtcagcgggtatccacgaagtgtacggtggcgacctttgtacagtgagtgatgagcaacaatttttctcttatcgacgcgaaggaatcaccggccgcttggcaagtttaatctggttgatctaacctattgaattaggacgatccaatgacgcataccacaaaactcaaatatattggctaaaataaccttgaaaagctgagggatgacctcatctaatctccagtagcaattttgaccagtattggaggtgttatgcgtctggatcgtcttaccagtaaattccagcttgccctcgccgatgcccagtctttagcccttgggcgcgacaaccagtttattgaaccgttacatttgatgagcgctttgctcactcaggatgggggcacggttcgcccattgttaacctctgccggtatcgatgttgcgcgtttgcgcacggaaatcgatcaggctttgggacgcttgccgcaggttgaaggtaccggcggcgatgttcagccatcccacgaattagtgcgggtactcaatctttgcgacaaactggcgcaaaagcgcgcagataaatttatttcttcagaattatttgttctggcggtgctcgaagatcgcggttcgttgaccgatctattgaaagccgcaggtgcaacaaccgataaaatcagcaaggcaatcgaacaaatgcgtggtggagaaaccgttgatgacgccggtgcggaagatcagcgccaggcattgaaaaaatacaccattgacctgaccgagcgcgcggagtccggcaaactcgatccggttattggccgtgatgaagaaattcgtcgcaccattcaggtattacagcgtcgtaccaagaacaacccggtactgattggtgagccaggggtgggtaaaaccgccattgtggaaggtttggctcagcgaattgtcaacggtgaagtgccggaaggtttgaaacacaaacgcgtgctttcattagatatgggcgcgttgattgccggtgctaagtatcgcggtgagtttgaagaacggctaaaaggcgtattgaacgacctggccaagcaggaaggtagcgtcattctgtttattgacgagttgcacaccatggtcggcgcaggtaaaggcgacggtgcaatggatgcaggcaacatgctgaaacctgcgttggctcgtggtgaattgcactgcgtaggtgctactacgctggatgaatatcgtcagtatatagaaaaggatgcggcgttagagcgtcgattccagaaagtatttgtagcagaaccgacggtagaagacaccattgccatcttgcgtgggctgaaagagcgttatgaattgcaccatcatgtgcaaattactgacccggcgattgtggcggctgcgaccttatcgcaccgttatattgccgaccgtcagttgccagataaagccatcgaccttatcgatgaggccggttctagcctgcgtatgcagatggactccaaaccggaatctctggatcgtctggaacgtcggattatccagttgaaactggaacagcaggcgctgaataaagagtctgacgacgccagtaagaaacgtttggaaatgctcaatgctgaattagagcaaaaagaacgcgaatattcagagttggaagaagagtggaaagccgaaaaagcctctttaaccggtactcagaatattaaaaccgaactggagcaggccaaaattagtctggagcaggctcgtcgcgttggcgatcttggtaagatgtccgaattgcaatacggtaaaattccagaactggagaaacagctggctgccgctactcaggccgaaggcaagaccatgaagttgctgcgtaaccgcgtaactgaaacggaaattgccgacgtgctggcgcgctggaccgggattccggtggcgcggatgctggaaagcgagcgcgacaagctgctgcgtatggaacaagacctgcatcagcgggttattggccagaacgaagcggttgaagccgtttctaacgcaattcgtcgtagccgtgccggtttgtcagatcctaaccgtccgatcggttcattcctattcctcggcccaaccggggtaggtaaaaccgaattgtgtaaagctctggcgactttcctgttcgacagcgacgacgctatggttcgtatcgatatgtccgagtttatggagaaacattccgtatctcgtttggttggtgcgcctccgggctacgtcggttatgaagagggggggtatctcaccgaagcggtacgtcgtcgtccttattcagtgattctgctggatgaagtcgagaaagcgcatccagatgtgttcaacatcctattgcaggtattggatgatggccgcctgaccgatggccaaggtagaacggtagacttccgtaataccgtcgtcatcatgacgtctaacctggggtctgatttaattcaggaacgcttcggtgaaagaagctatacggaaatgaaaaacatggttatggaagtggtcagccatcacttccgtcctgaattcattaaccgtatagatgaagtcgtcgtcttccatccgttggggcgggggcaattggcttcgattgccaagattcaattggagcgtttgtacaaacgtctggaagaacgtggctacgaagttactattaccgaacctgccttggagttcttgggtgaagctgggttcgatcctgtatacggggcgcggccgttgaaacgtgccatccagcaggaaattgaaaacccgctggcgcagcagatactttccggcaagttattaccgggtatccctgtgatattagatgttgaagacgggcatatcgtggccaaacagtcatagtgaaatggaaaggggcgatttatcgcccctttttgctttctttttacccagaaatgccatttttgatgtatttatagccggttggaaaattatttgaaattaggggttgcagcctgtcaggaactccctataatgcgcctccactgaccgggaacaacgaaacaaacttcgccgggtcaggaagtgttaagcaggcggaaacgccggttcttaaaacgaaagttgaaaagaaaagcttgacacttcagcgggaaagcgtattatctgcctcccgcgttaccgtaagattcgccgcaagcgaacgggtaacgaacgctctttaacaatttatcagacaatctgtgtgggcactcgcaagacgatatcaaagcctgtttcggcaggcagaagaaatatcaagtcttgaagagtgaccaaagcagtaaacatttgaacttcggttcgaatgcatatttgcagaaagtaatctttgagcatcgctacttcggtagcaaatcaaacaaatcttaaattgaagagtttgatcatggctcagattgaacgctggcggcaggcctaacacatgcaagtcgagcggcagcgggaagtagcttgctactttgccggcgagcggcggacgggtgagtaatgtctgggaaactgcctgatggagggggataactactggaaacggtagctaataccgcataacctcgcaagagcaaagtgggggaccttagggcctcacgccatcggatgtgcccagatgggattagctagtaggtggggtaatggctcacctaggcgacgatccctagctggtctgagaggatgaccagccacactggaactgagacacggtccagactcctacgggaggcagcagtggggaatattgcacaatgggcgcaagcctgatgcagccatgccgcgtgtgtgaagaaggccttcgggttgtaaagcactttcagcgaggaggaaggcatttcacctaatacgtgaagtgattgacgttactcgcagaagaagcaccggctaactccgtgccagcagccgcggtaatacggagggtgcaagcgttaatcggaattactgggcgtaaagcgcacgcaggcggtttgttaagtcagatgtgaaatccccgagcttaacttgggaactgcatttgaaactggcaagctagagtcttgtagaggggggtagaattccaggtgtagcggtgaaatgcgtagagatctggaggaataccggtggcgaaggcggccccctggacaaagacygacgctcaggtgcgaaagcgtggggagcaaacaggattagataccctggtagtccacgctgtaaacgatgtcgacttggaggttgtgcccttgaggcgtggcttccggagctaacgcgttaagtcgaccgcctggggagtacggccgcaaggttaaaactcaaatgaattgacgggggcccgcacaagcggtggagcatgtggtttaattcgatgcaacgcgaagaaccttacctactcttgacatccacagaacgtagcagagatgcttcggtgccttcgggaactgtgagacaggtgctgcatggctgtcgtcagctcgtgttgtgaaatgttgggttaagtcccgcaacgagcgcaacccttatcctttgttgccagcacgtcatggtgggaactcaagggagactgccggtgataaaccggaggaaggtggggatgacgtcaagtcatcatggcccttacgagtagggctacacacgtgctacaatggcagatacaaagtgaagcgaactcgcgagagcaagcggaccacataaagtctgtcgtagtccggattggagtctgcaactcgactccatgaagtcggaatcgctagtaatcgtagatcagaatgctacggtgaatacgttcccgggccttgtacacaccgcccgtcacaccatgggagtgggttgcaaaagaagtaggtagcttaaccttcgggagggcgcttaccactttgtgattcatgactggggtgaagtcgtaacaaggtaaccgtaggggaacctgcggttggatcacctccttacctaatgatacgcattgcgcagtgtccacacagattgtctgatagaaagtaacgagcaaataaggccgggctgagagattagtcgggctttagtaccttgttgggtckgtagctcaggtggttagagcgcacccctgataagggtgaggtcggtggttcaagtccactcagacccaccaactcatccctgtagtgcgttaccgtcacattcgtttataacaataaacgtgcgtgtctgcgccttgtctggacatgagttgcagcaataaggtatttgctttttatatggggctatagctcagctgggagagcgcctgccttgcacgcaggaggtcagcggttcgatcccgcttagctccaccatataaaactatttcaaaatatattgctgccgcaaggtggacagtatgttgtgaaatattgctctttaacaatctggaacaagctgaaaattgaaacactgcagctaaaacttgtctctccgtagatttaccgagacaaggagtcacctgcaggtagagtctctcaataatcgcagcacgatgatgtcgaaagacaccttcgggttgtgaggttaagcgactaagcgtacacggtggatgcctaggcagtcagaggcgatgaagggcgtgctaatctgcgaaaagcgtcggtaagctgatatgaagcgttacaaccgacgatacccgaatggggaaacccagtgcaattcgttgcactatcgttagatgaatacatagtctaacgaggcgaaccgggggaactgaaacatctaagtaccccgaggaaaagaaatcaaccgagattcccctagtagcggcgagcgaacggggaggagcccagagtctgaatcagtttgtgtgttagtggaagcgtctggaaagtcgcacggtacagggtgatagtcccgtacacaaaaatgcacatgctgtgaactcgatgagtagggcgggacacgtgacatcctgtctgaatatggggggaccatcctccaaggctaaatactcctgactgaccgatagtgaaccagtaccgtgagggaaaggcgaaaagaaccccggcgaggggagtgaaatagaacctgaaaccgtgtacgtacaagcagtgggagcaccttcgtggtgtgactgcgtaccttttgtataatgggtcagcgacttatattttgtagcaaggttaaccgtataggggagccgtagggaaaccgagtcttaactgggcgtctagttgcaaggtatagacccgaaacccggtgatctagccatgggcaggttgaaggttgggtaacactaactggaggaccgaaccgactaatgttgaaaaattagcggatgacttgtggctgggggtgaaaggccaatcaaaccgggagatagctggttctccccgaaagctatttaggtagcgcctcgtgaactcatcttcgggggtagagcactgtttcggctaggggtccatcccggattaccaaaccgatgcaaactccgaataccgaagaatgttatcacgggagacacacggcgggtgctaacgtccgtcgtgaagagggaaacaacccagaccgccagctaaggtcccaaagtcatggttaagtgggaaacgatgtgggaaggcatagacagccaggatgttggcttagaagcagccatcatttaaagaaagcgtaatagctcactggtcgagtcggcctgcgcggaagatgtaacggggctaaaccatgcaccgaagctgcggcagcgacacttaggtgttgttgggtaggggagcgttctgtaagccgttgaaggtagtctgtgaggactgctggaggtatcagaagtgcgaatgctgacataagtaacgataatgcgggtgaaaaacccgcacgccggaagaccaagggttcctgtccaacgttaatcggggcagggtgagtcgacccctaaggcgaggctgaaaagcgtagtcgatgggaaacaggttaatattcctgtacttggtgttactgcgaaggggggacggagaaggctaggctagccgggcgacggttgtcccggtttaagcgtgtaggggggtattcctggtaaatccggaaaaccatcaaccctgaggcgtgatgacgatgcacyacggtgcagaagtagttgatgccaagcttccaggaaaagcctctaagcatcaggtaacattaaatcgtaccccaaaccgacacaggtggtcaggtagagaatactcaggcgcttgagagaactcgggtgaaggaactaggcaaaatggtgccgtaacttcgggagaaggcacgctggcgctaggtgaagagacttgctctcggagctgaagccagtcgcagataccagctggctgcaactgtttaataaaaacacagcactgtgcaaacacgaaagtggacgtatacggtgtgacgcctgcccggtgctggaaggttaattgatggggtcagccgcaaggcgaagctcttgatcgaagccccagtaaacggcggccgtaactataacggtcctaaggtagcgaaattccttgtcgggtaagttccgacctgcacgaatggcgtaatgatggccaggctgtctccacccgagactcagtgaaattgaactcgctgtgaagatgcagtgtacccgcggcaagacggaaagaccccgtgaacctttactatagcttgacactgaacattgagccttgatgtgtaggataggtgggaggcatcgaagcgtggacgccagtctgcgtggagccaaccttgaaataccaccctttaatgtttgatgttctaactcggccccataatctggggtgaggacagtgtctggtgggtagtttgactggggcggtctcctcccaaagagtaacggaggagcacgaaggttagctaatcacggtcggacatcgtgaggttagtgcaaaggcataagctagcttgactgcgagagtgacggctcgagcaggtacgaaagtaggtcttagtgatccggtggttctgaatggaagggccatcgctcaacggataaaaggtactccggggataacaggctgataccgcccaagagttcatatcgacggcggtgtttggcacctcgatgtcggctcatcacatcctggggctgaagtaggtcccaagggtatggctgttcgccatttaaagtggtacgcgagctgggtttagaacgtcgtgagacagttcggtccctatctgccgtgggcgttggaagattgagaggggctgctcctagtacgagaggaccggagtggacgcatcactggtgttcgggttgtcatgccaatggcattgcccggtagctaaatgcggaaaagataagcgctgaaagcatctaagcgcgaaacttgcctcaagatgagtcttccctggggcttcaagccccctgaaggaacgttaaagactatgacgttgataggctgggtgtgtaagtgcagcgatgcattgagctaaccagtactaatgatccgtgaggcttaaccttacaacaccgaaggtgttttagagagcgttttgattttcagcattgttaacagattggattgactggctgtgtggtgtaaatcacgtggcgggttgattgaaacagaatttgcctggcggcaatagcgcggtggtcccacctgatcccatgccgaactcagaagtgaaacgccgtagcgccgatggtagtgtggggtctccccatgcgagagtaggacactgccaggcatcaaataaacaaaagaggctaccctaacgggtggccttttttgtttgtctcgtttgggtggtgtgcgactcgagcatgcatgcgacaaactgcgcctgcgctggccccagcggggtgagtctcatccagaagatgagacgaatacagtggacactgccaggcatcaaatcaagcccagaccccatgccaaaagcgtggggtttttgctatggaaaaaagacagacgcgaggcggataaaagtcattgccgccctcgaaccgagcctcctgcgattgcggggggctttttgcgtttaagggcatgggaacccccgggaatgccgggcgttgaaggcgtatatggcgattttcattccataaggggcggcttatccggtaaattgcgccgccgttgacgttttcaggcagtaaattcgcagcattttcaggcagatacagtcactcaccgggcttatattaggtggggaatcaactaccgtcccagtaacattgatttttccatcaacgctggcaccgaaggatattatttagagagatagcactgaccagtaacgttttattgaatatagaaatatcctttaatagtttaaggatgagcattccgtaacgttgagtttaattcgctgcctgataaacaccgtatccggccatggcaccagctacatcccagacgaagtctttccagctccaccctgtaccgccctgacggctatcgtagaactctttccccgcacctatacctatagagaacaataaaccaaagctgcgactgcgggcgtctgaccaattctggtgctcgccatatgccgtgcctgccgcggcaaaagcagcggaggcgaagaagtgctgagctttgtctttccccgtccagctatcgttggccatgtgggtgcaggcagtgctcagaaagaataggggggcgatgacggccgaacggagatatgaacatcgctccatggagtattccttttgtagatgaaataaaaacctgtctttagataaagtagcatgtcaattccattaccgaaaccgatcagaaactgaatgaagggcaataagttagctactttagccgccagatataatcagccgccttttggagaccatatttacgggtaaactccgagccttaaaaatcagcgtctctttagtatgtaagatttaaatccgatgaagccaaaatatgttgatggcaaagtcgttagccataactttaatttggccaataaaaaacccggctattaaccgggttgcgatctgaccatcgaaatctacaggatgcggctgattagacggtcgatacgaattcgccgtaagcgacgaatcagtttcctgaccttcaccggatattgctgaatattttccagctcaaggtagtgggaaacaactttggtatgcgtacggatgcattctagctctttcgcccgctgttcgtgcatttcatgcttgggatcgtggatcaaaatggcgttttccagatccaggcgccaggcgcgcgggtttaggttattacccgtaatcagctgccaggtatcgtctacccacatgcctttcagatgataagtgttatcgccgtctttccatagtcgaaccacaagctggccgttatccacaaagcgctgtaagcgactgaggaagcggcgcagatttatttcatacagataaggtaaagctccgatgatcttgaaaggctgatcttccggaatatagaaatcgtttgccgttttgtccccgacaataatctcaacctgttttccttcgcgcagcaaataaatgatattgcgtaccagcagtgcaggcaggttgaaataaggagtgcagatagtgagcttttcgtcggcagaacacatcagatgatgtattgctttatttaaaggacttttctttcccaggccaaccaacggggtcacggctagttcatcattactgcttcgatccgtaaattcataaccgacatcacgcagggataagcggaattggcgggtctcgttttttatttcagggttttttggacgatcgctacgatctaagcgctgaaccgcaccggctcccaggatctgttgcttgatgtattccgccattgcattcgccatagccggatttttaattaactggtagcgatcgtaacggtatttatcgtgctgatgcagataaacatcattaatactggcaccgctgtaaatgactctgtcatcaataataaaacctttcagatgcagaacacccaaggcttcgcgagtatttaccggtacgccatacactggaacggcaacgcccggatgctttgccgccatatcacaataccaatcggcgttggtattaactgcagcagcaccaatacgcccgcgttgggcacgatgccagtcaactaatacgcaaatttccagctcaggccgctgttgtttcgcctgataaagtgcctgcatgacgtcccgaccagcatcatcttgttccagatacagtgcgaccaaataaatacgttgggttgcctgagcaattaattccagcagagttgcgcggaaaaccttcgggcagtaaagcgtttggacatcatcaactgactgggggagtttgggcagttgtgcaaggtgttgttgatgtttgctacgtttgaattttgacaacatcacagtgcgcttcttctctcgttatttgatggcaaaaccgccatagcttaagaatactaatccatagaatctggcgataataccactagttacccgtgttgtgcgtaagttttgcctgcgggttagctaatcgaccagctctgtggcctcggtcacccttatgttcgtcatctttcacgctggctgcttgcttccaatccaatgacttcgcgggttaagcttcggcaaatttgtgccgttgccgtttggccacggcgtgaaatttatcgggcataaatgagtcaataaatcacagtgttaattcgagattaacgattccgtcttccaactgtacgtcaacgttgaaccccaacttttgtgccagtccgatcatcccgcgattgtgcggcatggtaatggcggttaaacgggttaaaccgtggcctcgggtatagtgaatcattttctccaatagccgactgcctagccccaaacctttcaggtcggatcgaaccagtactgcgaactcggcgtcaatattgtctggatcgcttaaggcgcgagtgacaccaatgatttcgctgtttccatgttgctgacgcacagcgacaaaagccatttctcgatcgtagtcgatttgcgtcatattcgccaaatcatcgtgattgaactcgtttatctcactaaaatagcggtaataaagatcttcttttgtcaccttatcaatgaagtctttcagcaaaggctcgtcttctggcaggattgggcggaacaggcaggaggaaccgtcttttaggtgcaccagttcttccagttcttgcggatagggacgaatggccaggcgagtttgcggatcgccgctaattggcgccaactgcatagaaacatccaatagcgtgaattcactgccggaggccagcaccgggtgaatatccagacgggttatctctgggcaatcgagtatcagattggaaacctgcaccagcaggtggctaaggccaggaatatccaaaggttgtagcgcgccccgccggcgaatttttccaccttttaccgcctgtaaaatcagatagcgggccagcgccatattcagcggcggcagagcaaccgccgcctgtgtttcctgatgccactccacgccaccttctcccagcataatcagcgggccgaaaatggcatcttgctccaccacaatccgcagttcctgtgcaccagcgcggtgagccatgctttgtaccagcaggccatgaatacgtgcctggggataagtgcgcttaacccgatcgagaatatcatcagcggcgcgctgcacttctagcgcggtgcgcagatagagcattaccccctgaacctccgatttgtggggaatatccggtgagcgcagtttgattgctaccggatagccaatttgttcagcgatatgtaccgcttccacgctgtcactggcaatccaggttggcaggatgctaagaccgtaggcttgcagaattggctgcacttcatgggtatccaattgcgtagtgccttccgccagcgcctgacgaattaactgatgcacgtgagtggtattggctgttagtcctaccggtagagcgggtgtttcctttaattgtttctggttacggcggtattccaccatatgcataaaagcggtaatagcgccctctggagtgcgataagtcggtattcccgcttcggtaaacattcggcgggcgtcctgagatgaatattcgccacaccaattagttagtaaggtaattcgttttccgcgcgggtgttgctggatggccgaaatcagcagttcggccgttttattaccgggagccgccgcgctaggggagtgaattaatagcagcgcatcataatctgtactgtctaataacggcctgaccgccgccaggtagcgttcagcgctggcatcgtcccgtaggtctattgggttgcggatggtgacaaaaggcggtagtgcctcgcttagcgcgcgatgagtttgttccgataaggtcgccagcttgccgttacggctaatcaattcgtccagtgccatcgccgctggcgcagagccgttgctgacaatcagtagcttttcaccgcgtagcgggcgcatatgactgagcgtttcgaccgcagagaataattcgtgcgtgtcttgcactcgcaataaacccgctcgttggattgctgcgtcgtaggcggcgtccagcccttgctggccatcgagtaactgctgagcgcgctgagttcgaccactttttactactaaaatgggtttattacgcgaggcgctgcgagaggcggataaaaagcggcgggcgtcgctgatatgctcgatatacagcatgatggcgctggttttggcatcgcgagacaggaaatcgagcagatcatccaaatcgatatccaaactgtcgcccagcgcaataaagtaggaaaaaccgacttctcgctgctgcgcccagtccagcaccgtgttggccaccgccgccgactgggagatgaatgccagcttgcctttttgaatcggaactggagaaaaactggcgttcagtccttgccacggagccagtagcccaaggctatttggcccaagtaatcgcatgttatagcgatgggcacaggcttttaactcggcgaattgatctggcggcgcggacagaataataacggttttacagccgcgggtgcctaaggcatccaaaagtgacagattacggctggcattggtgcagagaatggctaaatccggcgttagcggcagggacgcgatatccggataggccaatacgccgctgaccgctttatagcttggcgtgaccggtaaaattggcccattaaacccgccgtccagcagattacgcatcatcaggaagcccgcccgctccggtttttcagaggcaccgataaccgcaatcgacttggggcgtaacagtgcttctaatcctcgttggctcatggcgtctcctgttagttaacctgctaaaggttgccagagagactttagtcgttttttggcagaattgctgtgacccgtggcactggatggtgaggtttgcctgctaagtattgctgcctgaaatagttaaagtgtgcgctcagtccttccgccgcttgcaaatcgccagcctgctccagcaaagcggcagcaacttcaacggtgcaatgctgttccggtcgctgggcttcgcgtagctgatagtttgaagtcatgttgacgttaagagaaagcatcggtaatcccgcaagatatgggcttttgcgaaacattttctttgcttctgtccaagtgccgtcgagcagaataaacagcggtggcttgccgcctgcagggatcttattaagaacctgtcgatccggttcggcgtaggcttcgggaaacacgacataaggctggcgggaaggatcggcaatggctgctagtagcgccgggtctacttcagttctggcccacaggaaggcctgtgtgttcggcagaatatcggcgattaaacggccggtattgctgggtttaagcggctcggtgtcgaacatcaccaaacaaaaacggctggtggcctgtaatggtctaatggtgtcgcacagacacagacgctcggccagcaggcaattttgacagcgaatggcgcgacaaccgcgggcgcggtaagggcgagtcgaagcgtcgaggcgttgtttacgcaggcgcagaacggcattttcagtcataacggcggcggcagatggtgtatcagtcacgactgactcctgagaaaaagcgctattctaatcaacccttggggacagggatagaacaaacgctccggcggagaaattctcggccggagcgggggagttaaccgcgatgattcactcgaaatgggttaaactaacgctagggtaaactgattactgcgccaattgctcatccagccagccttcaaaaggggctttaggcagcgcgccgctgagcatatcgaccattttgccgtttttatacagcataatggtgggaatgctgcgaatgcgaaaacgcgtactgagagcaggttccgcttcggtattgactttgacgaagcgaatcttgcctgcgcgctcattcgccacatcttcaaagattggcgcaaagctgcgacacggcccacaccaaggcgcccagaagtcgataacaaccggcaggtcgtcctgtagcagtttatccagcgtttctgcggtggcgttgctcacttcgccgtcaaacagcgaatgaccacagcggccgcatttagcgccatcatcaatacgttcttccggcaggcggttggtcgccatacatgctgtgcataccgtattcataaattagccttaattcttgggtaaagagagctggaaacaacagtattaagtggttttagcgtgggagagcgcgactctgaccacggtgttgtttcgtttatgttatctattatgatgacaaatgctgtcatcgccaaaaaggtttattcgatgaatacgatagttgccggcttttagcgctcgcttatggcttaccgggcggacatcaggtaatcttcgcgccctgcgcgttggtggagaagacaatgaacgattcatttagtggcaaaaacggcaaagttaaagtgatgtacgtccgtagtgacgagagcagcagcgacgaccgtaacaaaaacaagcgtccggcaggcaaaggccgtccggataacgcacgtcagggcggttcgcatcagggcaatccacgtcaggatggctcacgtcaggacaattcacgtcgtggtgactctcgtcgtagtgattcaggccgtaatgaaagcgatcgtcctcgccgtccggcccgttccgaagatcgcggcccgtacgactcaccgtggaagaccgtttcccgtgcgccgtccgaagagccagagtttgaccacggcggcatcggcggtaagagccatatcgatccggcacagctgcgtcgtcagcgtgcggaagaaacccgtgtgtatggcgaaaatgcctgtcaggcgctgtttaacagccgtcctgatgccattgttcgcgcctggtttgtgcagtccgtcacgccgcgattccgcgaagcgttgaaatggatggcggcaaaccgtaaggcttatcacgtggttgatgaagaagaactggcgaaggcctccggcaccgagcatcacggtggcgtatgcttcctgattaagaaacgtcagggtctggacgcggaaacttatctgcaacaggctccgcaacaagattgcgtattggcgctggaagaagtgggtaacccgcacaatctgggcgcaattatgcgtacttgtgcgcatttcggtattaacggcgtattgctgcaagatccggcaatgttggaatccggtgcggcagtacgtaccgcagaaggcggcgcggaacacatcaaagcgattaacgccgatgatttcctctccgtattggataccttccgtaacgcgggctacaccattgtgaccacttccagccataaagggacgactctggcgaaagccgagctgcctgccaaaatggtattggtgttaggtcaggaaagtgatggtctgacggacagcgcgtggcagcagggcgatctcagcgtttctatcggcgggactggccgggtagaaagcctgaatgtttccgttgcgaccggtattttactggcggaatggtggcgtcagaacagcggcgaataagccattgagctttgcgtagcacgcacagccagtgattttgtcgcgttgattcagcgggtttaacccggtaatccagtcaggctcaaactatgtttgggcctgatttgtttgtaacgtaatatgttaaatatttgattttttcagtatcagtatcatcctgttttcatttatttccccgtaaaatccaacggactctgtttttattcacatgactattaattgataaataagcgagatggttaatttgttttgttgttaatcctattacctatattaaaagcacgataaatattttgtgtgataatttaatgattaatttgctaataattaattaatccgcatttaattaaaatcaataaaataaattaattcgataaaaacagctaaattagaaataatagctataattattttttatgatataaatcgctgcttatgtaattagattgattaatatatgtaatttcatgcgagaatttaaattaaatacttttaaaaacaaggcgctattgtttctatagtgttggcgcaatgatgtcgaaactcgctatcagcgcactctatatcaccaaaataatgtatttcccgatttgaatcatcccaatttaatttatttgaatgtgaggaagagcttcatggaaaggcgtgcatttctgaaaggagcggcagctctgggtttaacggccggagctgcgtcggtcaatgcggtagaaaatgcgtcattaccgctgacggatgatgttgaaggggcattagcccgtttccgtaaaacggttccagccaattttaattccgattatgttgagaatgcggttatacctttctttctgagtcgtttctatgacggtgaaaaaccgatgttgccgatgattggcctgagtctcagcaagaaaaatgcgctgccctatgatctgtggggattgctgtataaggattggaaaccgacgccatccgaaggagaaaccgtatttttgcaagggctggatgagcgcggagaacataatatgcgtaagcgcatatattattccgcggtgacgcccgatttatatcagccaatgtatcaggaaaaaatcgcggcatttttcgatctgttaatggaaccgcaatttgcggataaaccttttatgcgtcactacgcggatcattatgtcgacgtatattgggatctgcatttaggcgttaaagggcaggcggtaccgcaaaaggttcgtgaagtcggtgagtcttttaatgctgtgctggcctatcgcgatcctcttcaacccattgtctacgaacattatatgagggttcgcagcaatattgattatcttaaacaatggattgatgagcgcgtggatgatattcgaaccggacgcgttgccgaaccgcaaaaaacgctggcctggtattggctaaaaaactccgaaaataacgataatttcagcaagaaagatatcgtttttgagtgtttccataactttgttgctttcaatcaatggggcaaaacgctgtatggcatcatgatgaatctcagcgaaaataatggcgatccggcggtaaaagccgccttcaagaaaaccatgagcggagattatcagaatgccaaagacgcggcctacacgccgttggatctattggttatggagttattccgcactatttcgccaaacgcccgcagtgtttccgttgcagaggatgtgcagcataaagtgtatggcgagcgttttggcctgccgttgaagcgccatagctatatcaacacgcctcataccagcagtaacttcaatccggttcactgggcgcagccggagaaatttgatcctgaacgttatctcaaggtgccgaccagcgcggaaatcaccgaagaagaatgcaagcgtatcggtttggctcgctgcccgttcgatattacctcaatgccggtaaacgatggccgcaatatggcagtgaccaacagcggatttgggacggtatttagcgtcattgatgataaaaaacaaccggtatgtgattacgccggttttgctccctttggtttcagctatcgccgttgtccgggagagcagtttactattcaggttatgggcgaatttttgaccaaagtctggcgggataaaattaccttccataaactggcgttggttaagcccgagagagtgccgatcagtccgcgaacggtgatcgatgacaatatcagtttcagaagatagctatagatactcgtgatgttactggcaaaaaaatgccgctcgttgataagcgagcggcatgagaatcctgaatcagcctgatttagtgggcaccaccgccaccgccaccggaggtaaacggaggacgggcaaaccacactaacaccagtaatagcaggaacaccccagccgacagccagaaaatctcattagccgaaattatcagcccctgattggtaatttcccgtgccagataggccgaggcctgctggtggttcatgcctaacttctccaattcctgataggtctgcaccgaattcgggttatacggattcacaaactccgttaactgggaatggtgcagagactcgcgctgactccagagcgtggtggtgattgaggtaccaatcgatcccgccagcgttcgtaaaaagttagacaaactggacgcggccgccattctttccggcgctaaaccggacagggtaatcgtggtcagtggcataaagaagcaggcaatagcgaaaccttgcacaaactgcggccacgctgacgcgccaaaatccattcccggctcgaatgtatatgcccgccagtagaaacaaactgcatacataatgaagctgaatgtcactagctggcgcatatcgatacgatgagaaaaacgcccgataatcggcgacagtatcactggcaaaatcccgaccggagccgatgctaatccagcccaggtagcggtatagccatagacttcttgcagtaactgtggcagcagtacaatagcgccgaagtacaacatataggccaggctgatacacagacagccaatagtaaagttacgcgatttaaacagcgagaggtcgataaccggatgatcgtcggtcaactcccagacaattaagaaggaaatcgccaccaccgcgacggctgccaagacaataatttcggtggagttaaaccaatccagctctttgccctgatccagcatgatctgcaaggctccgatcccgaccaccaatagcaccaatccgatagtatcgatcggtttgatttcggttttggtttcccgccctttcagggtttgcatcgcgaccagaatcaccacgatcccaattgggatgttgatgaagaagatccagccccagtgatagttatcgctgatataaccgcccagaatcgggccaaatatcggggcgaccacgatggtcatcgaccatagtgccagagccattcctcgcttggcggggggatagttattcagtagcaaactctgcgacagcgggatcaacgggccggcaaccagcccctgaatcacgcggaagaagatcagcatacctaaactattggaaacgccgcatagccaggaggctagcgcgaatagcgcggttgaccacagaaataagcgaacctcaccaattcgtttcgccagccagccggtgatggggatcgagatcgcgttcgccacaccaaacgaggtgataacccaggtgccctgtgagttcgaggatcccagatcgcctgctatggtcggtattgccacgttagcaatggtggaatccagcacctgcatgaaggtcgccagcgagagcgcgaccgtcatccaggcgagtctggagccctctaggggtttttgagccacattagcctccggcgggcttaactggcattcgcctggatcacatcggcaatcatttgattaaccggtgccagatccagagaaagcgcattactttcgaaggcgggttttttacgtacgctttcggccagaaccaatccatcctgattcgccgtatcgacccgaacgacggaagacaaaccgatacgcaacgggtgctctgctagctgtttggcatccagctcgatacgcaccggcaggcgctgtaccactttgatccagttaccggtggcgttttgcgctggcagtaaagagaaggcgctgcctgtccccatatccagaccgaccactttgccctgataaaccacatcgtcgccgtagaaatcagtgactacggtagccggttggccgatacgcatattagccaattgggtttctttgaagttggcgtcgatccacagctcattggcgggaaccacggccatcagcggcgtaccgctggcgatctcagcgccaacttgcacgctgcgacgggaaacgtaaccggtgatcgggctgacaattttggtgcgctgcaacgctaaccaagcgtcacgcatttgcgcggcggcctgctcgatagccggttgtttctccagcggcgtatttaaaaccatggcctgattggcgttaaattgctgtaccgctacgtcgagcgtcgctttggccgcttctaccgcatcgcgggcgtgttgcaattcttctcgaccaatcgcatctgccgcgcccagcacttcacgacgtttaagatcgctttgagcttttttcagttcggtttttcttaactcgatattggcctgatactgcttgccgttaatcacgagctggtgggtttgacgcacgctgttcgccagcgcggtttgtgctctggcaaaagcctgctcagcatcggtggtatcaagagtgaccagtacatcgccgctttttaccaaatcggtattttcgaagttaacgctaacaacgctgccgggcacctgggacataatctgtacctgattaccggaaatataggcattatccgtttcctgatggtgacgcagcaccaggaaccagtaaaccagataagctaccccaataatgataaaaataaccgtcaagagaatcagtatattcttgcgctgcttctttttattttgcggttgtggcggggtttgaatttcctcgcttgcgctcatggtgttctccacgctttatattattttgttgtatgagccatcgctgtcggagcttgatagccgccgcccagtgaacggatcagtccgatcttcgcctgcaataagttattgctggcgctaagttctgcctgttgttgttgcaagaattgtgactggctggtcaatagttcgccgcgtccgataatcccggcttgatagcgagcattggcaacgcgatacacctgttccatcgcggcggaggctgaagcggcttgttgtaactgctgctggctgctctgctggatggtaatggcgtccgccgtttcctgtaccgcatttaaaatagtttggttataggcttcgacagcttcgtcgtataaagccgattcttcaccgagtttgctgcgtagcgcgcctgcgtggaatatcggtagggaaattgccggagcaaagttccatgcctgactggcggcttcgagcagattcgggttagtcccctggaaattggtggtggagaaaccggcaaagccggtgattgataagcttggataaaactcttttttcgccgcctgtactcgctgatcgtaagattcgaccaacaaacgttgagcggtgatatccggccgttgacccagtaaatcggtagtcagctctgcgggaggagataagcgattaatatccggaaggttcacctgacgtaggttttgcgttgcgctcggtccttgcccggtcagggcggccaattgatgttttaattgctcgctctgcgcggttagctggattatttgctgttttacgccgtcagactgcgcctgagtctgctgcggaacttcaacgccgtagatacccgcctgatattgtttctgatgtaacgccacccgacgctgattgttttccacttcctgctgcaatagcttttgcagcgccagatggctttggagctggtaataaaccgaagctactgagctggttagcgttagcgtggcctgttgctgctctgcccgggcagcatcgacctgtgctttagccgcgttgacccgattgcggaatttcccccaccagtcaaactcgtagctcatgtttagccccagcgtattcgctgtttcatacagaggcttgtttggataagcctgcaaaaatggctgaagcgtattttgcgatattttttgtcggttgctgctgccgtacaggtccagatttggcccgttggcagcatctgcctgccccatcacgctttgtgcctcacgtacccgcgccgccgcctgtttcagcgacggtgaggtttgcaggctttgtgtcattaatgcatcaagctggggatcgtccagaacccgccaccactgagagcttatcgccagcgaactggttttcggttgcgccaattgcagttgctggttatccatcatacgagactgaggcgcaatattatcgcttgaggcacagcccgccagtagtaaaacggcgaacaaaggcgtgaccctccagctatgtggggatggcatagttatgttacctggacagagatgtaaggattacaattctggcacttccatttgatccagacgggttaatagcttacgagtcagcttttcaagctgttgctgctcgtcagcatccagtgttgaccagaggaaatgcagacatttatgttgcggcggcaggagttggtttagaaactcttcaccggccttggttaaatgcagatgaaggcaacggcgatcgttatggctttcgcgccgttcgatccaaccttttttctccagctcatcagcaatgcgggtcgcgttggtacgagacgatcctaatgctgcgctcagttctgaaggctgaatgctgtggctttcctgagcatccaaagtaattaatgccatgaacagggtttcgttaatcccttgagctttcaacatcttattgcgattttcgagcaacttgctatgcatatgcatgcacaggcgggtcagcagaatttcctggtaagggaagtccttctgacgtttagcacgaaaattaagcatttgttcaatgggagtaaacgagctttccatgataaagagcctcattaatttcagatgatacagtaacgatagttactaataatgtaaacgctataatacggtaaaactttagcaattagtgttatttcaccgaggtatagcgttgattaatgccaaggatagtagggatatcgcggaattgcccacgttttgaatgcgttatcccatcattagcaatttgaaggttattccgtagctcagagcgccaaataaagtagcgaaaatgatgctcttggttttatagaaataggcgcagatcacgataaatccgaccaaagtagggatgagtttgtgcgcgtcacgcacaatttccggcacgctggaaaccaccagtagggcgcaaatcgaagcaattccgatactatccagcaggagcgaaattttcccgcgttgcagaccggcctgcttgcgcgctgggcccagccgtagcgggagataacggaataaatagttcaccagcccgaccaccacgccgattacgatgacatccgtattcatagctgttgctccttagcctgtttttctgccgcatttgaatctgttaaagacgcagcgggaggctgaattaacgccgccaggcagccaccgcagataccagccagaatcgccaccggaatagagaatacgagtgctcccagcaatgcgccacctagcgaagccaccaccgtcaggctgtattggcgtttaaaggaggcgagcagaaaactcaaaaatagcgctggcagcataaaggacagtgaggcttcaactgccggatagttatctaacggtccgttgccaaatacggcacctaccgctgtgcccaccacccaggacagccaggaggtgaatgagatgcccagcatccagttttcactccagcggcgctgatctttcatcagtttagcggtagcggcagcgaagacttcatcggttaatccgaaggcccacagggcggttttcttaccggatagacgcgccacaatgcggtgttttaacgcggggccatacagaatatggcggacatccattgccattaccgttagggcggaaacccatagggacattcccgcgctcaataatgcggtaatcacgaattggctggcaccggcataaataatgcaggaaaagaaaatgctttccagaggagtaaaccccagcttaactgcgcttaatccaaaggcaaaagctacggggagataaccgatcacgataggaaggctatcggtcacaccttcacgaaaacgggcgatgggttgatcgggggaaagggagtgagttattggctttggcatgatggtagctacgggtcggctcggttaaagggtagaaagcaaatttaaacatttggtaacattaccagagtgttaatactctttgtaccccatatccaaaatttatatctcaatttactatttgcaagctaatcatttaatttttttaaattagctcactggatgatcggccgcagggtcaaatttcttacccattaaccacaccacaatattgagcagacacaatccgcagccggcaatggcaacgccgtaccagcccgcatgttgataggcagcggcagaaaccagcgagcccaatgcgccgccgataaagtaaatggtcatataacctgcggttaagcggttccgcgcttcaggcatcatacggtaaatcacgctttggttagtgacatgcaccgcctgcaccgccagatccaaaatgacgacgccaatgattagcgcgattaacgaatattgccccaaagcgatggggatccatgacagcagcagcaggcccagaccggcgctggtggttagtcgcgctttacctttatccgccaaacgacccgctttgtttgccatcagagcgccagcggcgcccaccagaccgaatagaccgatggtaccttcggaataaccgaaaggaggtgaggccaacaaaaaggccattgaagtccataacacgctgaaattagcgaaagacaaggctcccagcatagcgcgagtgcgtaataccggcgtaccgaaatacagcgcaaaaatagaacttagcaattgcccgtagttcagaccggccttttgtttataacgcggtaggtagcgccacagcaccagcgccatcaccgccattagcacgctggcaacccagaaaatagttcgccagccaccgagggaagccagtgcgccagccacggttcgcgccagtagaatacccagcaataggccactcatgatggtgccgacgacctgaccgcgcttctccggtttggccagggttgcagccaggggaaccagtaactgcgcgaccaccgagaacaaaccggtcagcgcggtgcccacgatcatcatggtcaggttttgcgacatcgccgtaatcagcatgccgccagcggctaacagcgtcatgccgacgatcagaccgcggcgctcaaacatatctcccaacggcactaaaaacatcagcccaacggcatagcccaattgagctgcggtaacgataaatccagcctgattgaccgaaagattaaatgcctgagcaatggtttccagcaacggttgagcgtaatagttactggcgaccgccagaccggtagcgatagacatcagtacgatcaacgcagggcttagcccggcatgttcagttgtttggttcatgaataattctgcttaagatgatgagggcgacagtattggataaatttaaacgataaaccaatgtataattttcatctgattaatctcatttcgagatagataaatgaacctgaagcagattcgttatgcactggcggtggcagaaacccaaagttttactcaggcggcgcaacgttgtcatacggtgcaatcggcgctgagccaccagattgctcgtctggagcaagagttgggttgccagctgtttgaacgtacttcgcggcgggtcagcttaaccgacgccggacaggcttttattctgcccgctcaacgcttgttggcggagcagcaaagcctgatcaatgaagttaatgccgccagcggtaacgtgaccggtactttgactctcggcactatttcaacgctaaatgcctttgatctgacggaaaagattggagaatttaatcgctgttatccggcggtgaatattcggctgtatgttggaatgagtgaaactttgcttgaagacacccgacagcagaaaaccgatgtgtcttttgtcggcatctggccgggggataaaaatacgttgccgctttctcattgtaagctaacggatgagcctctggtggcgctggtggcaccggatcatgttttagccggtaaggccagcgtagacctgcaaacattggctgctgtcccgctggtggatttctacagcggtacgggggcgagacgtcaaaccgatcgcgcttttcagaccgcgggtatcaagcgccacgtcaatttcgagattgatcatattgaatggctggaaaatctggtgcgacgtgggctggcggcggggatcgttcctgtctcgaccgctcagcggctaatttctctggtgtctatcccgatcgacgatgggccgcggcgtcaggtttattgcatctggcatacgccgcttagcgctgccgccgaacgtttcctgcattttagcgggtttaccggacagggtatcgccagcgctgagtaaatctggaaagtccgtaagatgagcggttagattgccagataaaaaaacaggcaccgaaaggcgcctgtctggtttacgtcagcggaggaggtttattgcgcggttttgttattggcagcttcagcggcggtttttacccagccgtcaaaggttgcctgatgcgcggctatccagccattcacatggcgctcaatattcgcatccgatgattcaccggcgtgcattctcatattctgcgcattcacgtcactaatcggtagtttcatgatagagaacagtttggcggcagccggattcgcttccgcccatttcttattggcgacgatgtgcatcacgcttggcggaaaaccgtagttggcaccgttagccagttgggtatcgatgcttttatccggcagggaggagaacggtacttgcagccagattacgtcacgacccggaaccagcacatcgctaacccagtaaggcgtccaggtgtaatacaaaattggcttgccttctttgtaacgggtaatggtatcggcaatcattgccgcatagttgccctgattatgggtgacggtattactcaacccataagcatcaatctgatgattaattggtgcttcacaaccccaacccggattacagccagtcagatcggctttgccatcgttgttggcgtcaaacagcttggcaatcttcggatctttaagctgttcaatattggtaatgtggtatttatccgcagttttcttatcgatcaaatagccctgcgccaagccttcaatataattgccctgacgatagaatttggcatcgccacccgccgctttatattggtcgtcatgcagcggctcccagtttaccgccagaaaagtcgcatcaccggcagcgatagtggcataagccacgttgtaatcaacttccttggtcggttgaacgtcgtagccgagtttttccagcgctttattcaccagcgcggtctggaaggtttcttcggaaatggtgctttgaatgggtaaaacggtcacgcctttgcccggtaattcagcggcggataattgagagctaaccagcgtagtgagagccagtgcccagatgcctgtggtgcgcatgagttgttccttcttagtcttgcccttcatctttcacgccgcagcggtactggctgcaacctgaaatctatcgggcatgagtaaaattgatgacttattaagcccattttagggagagcgcagcgatgggatcgaattggcgtcagccacctgaacgcctttggcgtggtagaaccaagaatctcgcttgaatcccgttccctgtactgcgccgcgattttggctatccatagggtatttatatgatttgtttttaacgctgccgctgggacgattgccattgcggcagcgttaagaacgcaggctatcagcccttgtaacaagctgttatcacgcttttttgataaaaggtttggcgatcagacccagcgggccagtggtgtaccagcggccaacgcctttgctacggcgatctcggcccagagattgagttaggcggtcgaggataatcgccagaataacaatccccacgccaccgacggcagctaatcccatatccagacggccaataccacgcagtaccatttgacctaaaccaccgaccgcaatcatcgaggcaatcaccaccatagacagcgccagcatcagagtctggttaacgccggccataatggtcggcatcgccagcggcaattgcaccttaaacagcaactggcgtggattggcaccaaaggattctgcggcctcgattagatcttccggcacctgtttgatacctaaaatagtcaatcgcactatgggtggcagagcaaagataatggtgacgaccacgcccggcacgttaccgataccgaacagcatcacgattggaaccagatagacaaacgctggtgtagtctgcatcgcatccaataatggcctgataattctggcggcgttattactgcgtgccagccagatcccgaggggcagcccgatcaaaatacagaagaacagcgaagtcagaaccagcgccaacgtaaccatcgcctgtgaccatgcgccgatggcaccgatagcaatcagagacaccagcgttgcgacgcccatccccaaggtagaaaactgccatgcaatcagagcgaaaaccagaatcgcaaccggcgctggcattcccagcaacatgtgctgaaaaccgctcaggataaaatcaaccggaacccgaatgccctgaaataccgggcggaagtgagtcacaacccagtcaataccctgtgtaacccacgagtccagcggcacccacgtgttgtggaatgggtccatcaggctaaaatgctcgggagcgacagcaggcgcgctgtttaaccagtctgcgcctgtttgtgcggtttggttggttgcttcctgagccgccgcgctgccctgagccatgctggcgccccaaggatctgccgcagcagaaagtacctgcggcgcagcatcggtagcggtggtcgacgcctgttgagcaacatcagccgccgtctcccacggattattgataacctgctcgttaacctgtgttgtattactcatttggcgtctccttatctaaggcttgcagcagcatggccttggaaataataccgatatagttgttgtcctcgcccaccaccggaacggcgcaaggggcttgagcaacaagtgaaatcaactcattgagcggcatatcagccggaaccggcgctggctcagccaataaggcatgatcgagcggctggttttctgaaagagcctgtttcaatgaatctatcgataccacgccgataaatttttgcccgcgttccaacacatagccgtaatcgcggtcttcatcctgaagtagttttaacgctgaacgggggccaaatcctggagtcttgcggattaaggccaccggacgacgacgagcaatatcttttgcgctaaatacgtgactaatatcaacgccacggaagaaggttcttacatattcatttgccggattattcaatatttcatccggtgtaccgacctgaacgacttccccgccttgcataatggcaatacggtcgccaatacgcatggcttcgtctaaatcatgggaaataaaaacgatggtacgctgatgcttggcctgcaatttcaccaactcatcctgcatctcagtacgaattaatggatctagcgctgagaaggcctcatccatcaataatatgtccggattgtttgccattgctcgcgctaaaccaacgcgttgacgcataccgccagaaagttcatcgggatatgaataagcataattatccagactgacctgacgtaacgcctctaatgctttttcatggcgttcttttagcgggactccggctaattccataccaaaggctgtattatctaacacattcagatgaggcattaaggcaaatgactggaataccatactgattttatttcgccgaacggtccgtaatgcactgtcagatattttggcaatatcttcaccatcaataaggacttcgccgcgagtaggttctatcagacgattgagaaggcgtaccagggtggatttaccggaacccgataaccccatgatgacgaatatctcgccttcttcaatggccagactggcatctttgacgccaacggacaaaccggttttactaaatatctggtctttattcatgccagattcaatcaatttaaaggcccgatccgggtgctcaccaaatatcttatataaattttttacttcgagtttaattgccatgcagtgggtatattcctctgtcaattcttagattatattttttcctgatgcaaaaatagagcgccatataccctaacatactgagagtctgaggcaaccctcaatattccgataatttatttgatgttgttaatcatgactttatatatgaagtggctcatttgatttagatgcgttaatactggggttgtttgagatgatatcgcaggtaaatataagatattttttatgccaataatgagtgtgaaatgttttctatagagatgataatatggcaatgtttttatcgctgatatagacagatatttgacagatatatcagaggatattgtctttgatgataaacatatattagtgcgattaatctatggataattggcgtggcggaaattgctctcatcccttttgtgctctgggtataagcccaacgagaattttcttggcaaggctgattttgacgtgatttttagctaaacagacggatctgataggcaatttttatactcatagcgaaaggaaatttatcggggcagggtagcgatctgttattacccctcgctaccctccagacagggatctccctgttagtcagaaagaccttcagccgcgttaattttccgggatcaaaaatcccaatcttcatcctctgtcgttaccgcttttccgatgacataagaggaaccggagccagagaagaaatcgtgattttcatcagcatttggcgataatgcagacaaaatggccgggctaactttggcctcgctggctggaaatagcgcttcgtagcccagattcattagcgctttattagcgttatagtgcaggaatttcttcacatcctcgctccagcccacgcaatcgtacaaatcttcggtgtagcgcacttcgttatcgtataaatcctgtagcagatcgaaagcgaagtttttaatttcctgacggcgagcggcatcgaccttttccaaccctttctggaatttgtagccaatatagtagccgtgtaccgcctcatcccgaataatcaggcggatcagatcggcggtattggtcagtttggctcggctggaaaaatacatcggcaaataaaaaccagaatagaataggaacgattccagaaatacgcttgcaaccttcttcttcagcggatcctcgtggcggtaatggcttaggataatctgcgcttttttctgcaacggaccattctcttcactccagcgataagcatcatccacatcagacgtcatgcacagagttgaaaatatcgaactgtaagaacgagcatgtaccgcttccataaagctgatattggaaaataccgcttcttcatgtggggtgattgcatcctgtagtagtgcgggcgccccaacggtattctgaatagtatccagcagcgtcaggccggtgaatacgcgaatggccaactgttgctcttggagcgttagagttgcccaagagggaatatcattcgacagcggaattttttccggcagccagaaattggaggtcagacgattccagacctccagatctttatcatcttctattttgttccagttgatggctttcacgcgggataaaggttgcgtagcgatcatattcttgattccttttataacggcggcctacagtgagcaggagacgcagccttcaacttctgtaccttccaacgccatttggcgcaggcgaatgtaatagatggttttaatacctttcttccaagcatagatctgggctttattaatatcccgcgtggtggcggtatcacggaaaaatagcgttagcgataacccctgatccacatgctgtgttgcttgcgcataggtatcaataattttttccggcccgatttgataggcatcctgataataatcgaggttgtcattggtcatataaggcgcagggtaatacacccggccaatcttgccttctttgcgtatttcaatccgcgatacaattgggtgaatgctagacgtagcgtgattgatataagaaatagaaccagtcggtggtacagcctgtaaattctggttatacagcccgtgctccataactgaatggcgcaaagctgcccaatcatgctgggttggaataggaatccctgcacttgcaaacaatgcctgcacgcgtgaagtttttggctgccagctttgctcaatgtatttggtgaaatagcggccggaagcatactgtgaatcatcaaaacctttaaaacagctgccgcgttcaatggctaattgattcgaggcgcgaatcgcgtgataggcaacggtatagaaatagatattggtgaaatccagtgcttcttcagaaccgtaataaatctgttcgcgagctagataaccgtgcagattcatttgccctaaaccaatagcgtgagattcctgattccctttatcaatagaagaaaccgaacgaatatgactcatatcggaaaccgcagttagcccgcggatggccgtttcgatggtttgcgcgaaattctgcgaatccatggtatgagcaatattcagcgaaccgagattacaagaaatatctttgccaacatgtttgtaactcagatcttcgttatattccgttggctgattaacctgcaagatttcagagcataggttgctcatgttgatccggcctttgatcggattcgctttatttaccgtgtcttcaaacatgatgtagggataaccggattcaaactgaatttcagccagaatctggaaaaattcacgggcgcggattttgcttttgcgaatacgtttgttatccaccatctcacggtatttctcactgacgctgatttctgacataggaacgccataaacctgttcaacgtcataaggcgagaacaaatacatttcctcgttctgcttcgccaattcaaaagtaatatcgggaatcactacgccgagagacagcgttttaatccgcactttctcatcggcgttctcacgtttggtatccagaaaacgcaaaatatccgggtgatgggcatgtagataaacagcgccagcgccctgacgcgcacctaattgattggcataagagaaagcatcttccagcattttcataataggaataacgccagaagactgattttcaattcgtttaattggcgcgcccacttcacgaatgttgctcatcaggaaagcaacgccgccgcctcgtttggataactgtaaagccgagtttaccgcccgcccaatggactccatattatcctcgatgcgcagcaggaagcaggaaaccagttcgccccgttgtttcttgccacagttgaggaaggttggtgtagcaggttgaaaacgaccagaaatcatttcctctaccagatttctcgccagtttttgatcgccggcggctagtgtgagcgccactatacaaatacgatcttcataacgttccagatagcgctggccatcgaaggtttttagcgtatagctggtgtaatacttaaaagcaccgaggaaagtcgggaagcggaattttttagcataggcttgctggaataagcttttaataaagctgaagtcatactgttccagcacttctttttcgtaatagccttcttctatcagataatcgattttttcctgcagactatggaaaaacaccgtgttctgattaacgtgttgcagaaaatattggcgcgcagccagacgatctttatcgaattgaatttgcccatccgcatcgtaaagattgagcatggcgttcagcgagtgataatccagttcgctggttaatggggctgtcattgtgagttctgtcgttgccaaaattcggttactcccttacgaacatttgccacatcttcatcagtacccaacaactcaaagcggtacagataagggacctggcatttgtgggagataatctcgccggccaggcaataggcatcgccaaaattagtgtttcccgcggcgataacgccgcggatcaacgcgcggttatgcggatcattgaggaaacggataacttgaatcggtactgcaccgatcgaactgccgccgccatagctgggcaccagcaaaatgtaaggttgctcaacctttaatttttcccgtgctccggcaatcggaatgcgtatggccggaagccccagtttctccacaaatcggtgggagttctccgatgagctggagaaataaaccagcggattcatcatcgtcacctctgtcagaccgcaacgttttgactcagggcactgattttatccggtcgaaaacccgaccaatgattgtcacccgccacaatgaccggcacttgctgataaccgagggatttaatatggttgagcgcctgggaatcattcgtaagatcaatgacctgatagttaattccatgacgatctaaggcgcgataggttgcattgcactggacacaatcgggcttactgtaaataataatgctcatgattcgcatttaccttttgttttgaggtaaggcggataagtcagaaatgcgaagaacgctcgcggcctgactccctctttatcccccctgacagtattgccctgagcgacaaacaaatactatatgtagagttttattatttcaaccgcactatatgtagttgttttgatgtttttggaatgattagacagcgaagcgccgccagccttgggctagcggcaaactggcgggaataaaaaatatttttccagtaaatggttggaaaaaggctgaaaaaagactactggcgcaagctaacggccaggcggttaaaggcattcatgatgctaatagtaaaggtcagatctgaaatttctgtatcgctaaaatattttttcaataaatcaaaagcgttgtccggcgcaccggttgtcgcgatatgggtaacggattcagcccaggccagtgcagcgcgctcggcatcgttatatgctccgctgacctgccatccggctaacatatcgattttactttggctgacaccgctgtcgcgtagggctttcccgtgcatattcaggcagtaggcacagccgttgatttgtgaaactcgcatgaaaatcagttcaatcagggatttgtcgagagaactattttccagcgtcatcaaggcattcatgagtgcttgataggtggaagaggacagctgagagtaattaagacgttgttcgatcatggaaagtaccttctacaagtgcagtgacgttgagagcgactctaccaaccccatgacctatactatagtggcataacttgattttttttatgggtcatgatgatgagtattcccgttcaattgcaggttgatcgtcagcaaaatgaacctgtttttcgccagatttatctgcgatttaaagaagccataacgcaacgaatactcttgccagacacccgagttccgtcggttcgcgctctggccagcgatctgggcgtagccagaggaacggtagaaaatgcctatgctcaattgattgcagagggctatttacaaagccgagggcaatcagggacttatgtatcagaccaactgccaagggtgaccgctccaatccccgccgagccgtcaaaaccgcggccagccgctaacatcaaccacgcttttgctctggaaacagaaagtccgctaccttttcaactggggctaccagcccttgatgcctttccctatgggctgtgggcgcgaattgttaatcgacaggctcatgccgcgactcgcgcttcattggggcatccgccagctaccggactctcagttttacgcgaggcaattgccagttatctccagctttcccgcggattccattgcttaccggaacaggtttttatctgctccggttatcagtctctgctggatttggcgatatcgacgctgttgcttcccggggatgcggtttggctggaagatccgggctatccggttactcagcagttatgcagagaggcaaagctgcgccacgagccgattccgattgatgcggaagggatgaatctgggtgcagctatagccaaagtgcctgatgccagagctgctattgtcaccccggcacatcaaagtccaacgggcgttgccctgagtctactgcgccgcttggcgctattggagtgggctgctgagcagcagagctggattgtagaggatgattatgacagtgaatttcgctatcaaggtcggccactaccgtcgctaaaaagtctggatcgtcaggggcgggtgctatacgccgggacatttagcaaagtaatgtttccggcattacgtatagcctatttggtggtgcctaaggaattagttgataagtttactcagcgttgtcgattgcgcgcctgtaccgtgccggtgctgattcaatccagcgtggctgaatttattcgtcaagggcatttttaccgacatttgaaacgaatgcggcatttgtatcctgaacggcgggcatggttagtggcggctttggagagccagctaggtgatattttgcaggtcgaagagcaggctggcgggattcagctattggcacgtttggataagaattacagcgatcggctggtggctacgctggcgcatcagcagggattggcgatacaggcactttctgattggcaaatagctatttctggtagcaatggattactgttgggctttaccaatttgcagtcagcagatgacgcgaaaaggcaagtatctcgtttggcatcgattattcggcttatggagagagaatgatgcctaagatcggataaaacaattcgacccacgtccaaaaggcagtgggccgaaaaaagagctatctgctagcctgcgactaacgacgcgacaataatacgccgagcacgacaccgactgcggcaccaataccaacgccctgccagggtttgtcacgaacgtagctgtcggcgttgcccacgacgtctcgtgcatgttgggtcagtgaggtggaaccgctaaagcgcgctctggcatctctcagcacgccttctgcattttgacgaactttttccagctcttctttggttttatcaccggaagagcgcaggacatcatcgagagtatctgccagcagatttacatcttgatcgatatttcgttcaactttctctgatttcttgaacattatgctctccgttttacttagtagacattaagcatagtataactttggctaataaaagccgcttacagaagaatcctaagagctatatcaacagccggcggcaataaaatccccgctggcactaataggaatgactgagctgaacagtaccaaaccaaacagtattaatataaatccgcctattaccgtggcaattcgtgacgcatgaatcagtttccccgccagtaactgaccgtggctagagataaatttttcgcgggcatgataaaccagcgttgcgacgatcattattgatagtgatgtgcccagcgccatgctcattgcggcaataacaccccaggtaaacatgcctactgcattcgcaaaaactaaaatcaggatggcaccgctacaggggcgaatgccaattgaggcgatgacccaaaggtaatttttccaatctccattcagttcttctgctagtggcatatgcttatggccgcagccgcagtcgacttgctgatgggaagaggaggacgctataggcaatttactgatgcctatagcgggaagaggaattatttggtgaatggcgaggcgcttttctttcttataaaggcggaataggctaatgcctgaagcgcgtagcattaagactacgccgaacaacataataaagaccgcactgcctttctcgacaaaatagcggctgaggctcaaatctcccattgagagattaaaaaagactgccagaatcagcacgaacaaaatagcaacaacgccttgcatcatactaccgaggaaagtgattaagcggctggtgttggctttttcgcgattggtagacaaataggtcgtaataacaaacttgccatgcccaggcccgacggcgtgtaaaaaaccgtaggtaaagctaaacagaaccagcatcagcccggctccgttctgattattttgttgctgaagcagatacatcactagataacgatgcatatatatctgtaggttaatgcaatattgaacaaaatcagaccaatgccagataagggtggctaatagagctgtcattagcagagcggtcagcatagcgccggcgactgaggttcgcgtaagtttaatgttcgcaatcatgatggggtgatccctgctattgatatcaacaggtggtaaatcctgtttttcccttgctccgccgcattttacccagaggatacagtgagacgagctgcactgaattattattactacatataagttatggcggataaatattgtcgacgaattttgcttttgtaaaagaatatatcgtctgttagatgctcgatgaagcgtgaaaatcagcattagtgccaggttgtacatttggttacttaacgaaaccaatgactcacggaaaggaaaaatagcttcctctatgattctttcaacggcccgacagggcttagcgaaacaaactctgaggaattacaaatgaaaaaagtattagcgctgatcgttgctgcaactatgggtatgtcttctgttgctttcgctgctgaaacagctgctgcaccagcgcctgttgctactggtaccaccgctgcggctcctgcggcagagaaagcggctccggccaaggcaaccagccacaaaaaacatcaagcgaccaagaaaaccactgaacaaaaagcacaggccgctaaaaaacatgagaaaaaagcaccggctcagaaagcacaggccgctaaaaaacacgagaaaaaagcaccggctcagaaagcgcaggctgctaaaaaacacgtaaaaaaagctccggctcagaaagcacaagccgcgaaaaaacaccacaaatcagctaagaaagccgccgttgctccagcagcaactccagcagcataagcacttctgattacagttgtctccaggtttgccaaacctcaacacccggttcttccgggtgtttttcgtttctatccgctgggaatgattcaaataccgaataggttacctgctttcctttgagatcgttaccgtccgaattttcatctcccgcggatattatcccgccaaagtctcgtgtaaatgccgccacagcagtttgccgtccgttgttttatcgaaaatcgccgttgataaacgacgatgtatcggttgatgaggcattttttgctgttccagataactgaccactgcgccttgcgagttttcctgaatcagtgtcatttcggaaagacgaatagttaaccccggcttagccgcagactgtgcccgaaaaaagtggcatagagcggaataatccaacgagtgaccggtcagggtgatcatggtgtactggggtgaaaagtccccgagtaaatgctcacaaacctccgggcaagtatcgctaccgctaaaccactgttcgataagctggtgggtgctgctgatgagaccaaaataggggttggcgttattcatattgattcctgtttgatgaaggcttaacgattgcgtaaatcacgtaaaatagacgtattagtcatacggctggatagccataggggtaataaagccgatgttgccgcgagtaaaaaacaccagtgaaaagcctgcgttgctggctggcgtagcgcggggttatccagtgcgccaacgccttttagcgccaacattaaattgagtagcaggctaagtaaggcaacgccaaagccgaagcccatttgtcgattgatgttccaaagtgcgctggcatcggccaaatgacgtgtttctgtatgcaaaaaagcggtgctttgtgcggtacagctgcacaagctgccgccaaaccccatacaggcaaaggcgatgaacatcgatggcagttgttccgcctgaacgatgttggttagtagtaacataccaatcccttgtgtcagacaaccgcagataaacagtggtcttggcccgattcggttaaagatttttcccgttaaagtaatggcaataaaagccgcaatggaccagggaatcatcagtaatccaacctgtgaggcactcatccccaatatattttgtaggtacagcatggtaatcatgctaacgccgatgaaaataccgggaataaacagataaaccagcattgagatacgcatcagcggctctttaatcaaactcaaattaagaattggctgagaatgagccacactgtgacgaataaaccccctcaacatgataaggcctaaaaccactaacagagcgccagaaattccgtgttctggttcactcaaacggcttaatcccagtagtaatagaattaataccgccgaacctgaacataaacctgcgatatccaacggcgattgttcggttttcctttcctctggttttaaccagataatggagagagtgagtgctaacagcgcaaggggcagattaagataaaatatccaacgccagcctaaggcatcgacaatcaagccgccaaccgccggtgatagcgccggagctaacaggccaaccaacataatgacggaagagagaccggctcgttcatcgggacgataatattgataagttaacgtctgacctatcggaattaataagcctccgccaaatccttgtaatactcgccatacgatcaataactcgatagaacctgcggttccggctgcggcggtagcaagtaaaaataacagtaaagaaagtaggaaggtacgccgtgcacctaccgttttggtcagccaggcgctcaagggaataaccagagtcagccccagaatatagcccgtgcttacccaggctaattgactgatactggcgtgcaaactgcgggcgatatccggataagccacattggcgataaacatgttaatcagatcaacaaaaaatccgagtaaatagacgattgcaactttagtacggtatgccattggagcctccgattgaaggcggggagtgtatctccgaggctatggctgataaatccgcacaatgcgattacactggtaaaaattttttgacaatctgggcggcaatgcatggtcagtttgcatcgattgggtacttttgttgcggtagtgaatgcggggtcattcactgcggcggcagatattttagggcagacgcgtgcggtggtgagcttcaatatcaagcaattagaagctgagcttggcgttgctttactgattcggacgacgcgtcgcctggcggtgacggaggtaggcgaacgtttttatcagcattgccagcgtttgttacaagatgctgaatttgcagtagaagatgcccgacgcggccacggtactctcagcggaactttacgtattactactacgccggaatacggtattcgtactttggttcctattatggcggcctttatgcgccagcatccgcatttgaccatccagcatgcttgttcttcgcagcatgccaatctgatctctgaacgttttgatgtggctattcgccttggacaactggttgattccagctatcgagccgcattgatcgaaacattccctatattacctgtggcttcaccgatgtatttacgtagtcacaaaataagttgtttagaggatttgcggcaggcgcagtgggttgcccatagccgtcttgccacgccgttgacgtggcaggtacaagggccggataacggctggcaactgttggatgttaccgagcagcctaaagttttggccgatacctcggcttcactacaggtatttgcccgaaaaggtgcgggcatcgcgttgttaccggaatggctggtggcggaggatttagtcagcgggctgttgcagcaggtattgcctcagtatcgttttccggagcagggggtttatgccctgtatcctaatactcagcatgtatcggaaaaagtcagggcatttatcgattttcttcgccttagcgtaaaaatgaagtcagcttaaaagccaaaagttttaccaagcatgaaacgtagatcgccacacagtcattgcctttggcgcagcaaaaccactctccatgtagactattctgaaataacctgtttgaggcaataaataggttatttcccttatttattgcggtaaggtcgctccaattgctgtcggaaggagggataataaatgtatttaagaccagatgaagtggcgaaagtcctggaaaactctgggtttgagcgagattatgtggtcgaacaggcctatggctatcgaaagggcattcactatgtgtatgttaatcgggaagcacgcatggggagaactgcactggttatccatcctgcgctgaaagatagaagtctgctgtttgccacgcctaccgctcccattcgtatcagtgataagtaccatgagtttccgctctatctggcgggagaggccgaagagcgttatggtatttctcacggtttcagttcgcgggaattactgcaacgctacctgcatagcatgttccaatagctttatacttcaatgacttttttgccctaatcggcagaaatagcctcaagcaaaaatctggcgcgccgtatccatccaatcaatgcaatacggcgtctgattcctggttgaaattcatattgtaggtgcgcctgaattgagccagttcgaaggcgtctatatccaattcagcaaaatagaacaaagcggcttctgtatgctctgaagttagcgttggcggaatatgcgcccgcagcaacgtattgcgccattgcgccacgttttcatcggaagcgtctttgataaaagtttgataaataaaaataagataggcagcttttcgcacatcctcagcataaccattgctgatggatcggataaacatttgcgtttgacggtttcccatttcttgcagcatcgattcgatataaatcggttttatcttcaacaaagtagctaaagtatctacggtttttcgtgtatcagacgttaagactcggtaacccacaataaaaactacaatgagtacagcaatgattatccatgtcattattatatctttcatcaacttagaataattaatcgagtagcattctcgtcgcaaatctgaccttttggcaaagcttagcgatgttcgccgccaaaatttccttgagattgctgcacagagttcaaatgacggttaaaagaagcggcgtctttggctaatgcatcgagatgtgcgcctaacattttgatttgctttactagctgatgttgttccggcaacgaattagcctggctcaactttttcagcagtaaatcattttgtgtttttaggattgcttcacgggcttttgactgttccaaggcgtgttgcaacgcttcatagctttcctgccatacctgatgctgtttctcgaacgttgactgcaactcattcattgcactaagaaacttcacttccagctcgcgcattgtcattgtttctcccttggcatatcccgattatcattggcagtataactaaatctccccttaacctcatccgctagaatttatctcaccttgcacttagctgaatgggttactcgaaaccagcgagtatagatatttatcataaatcggtgctttggatgtggtttactttttacccatgggttatgcctttgggaaataagtcttgctataaaaaggctgccgtgcgttaataagcgcatcggtttgtaacacagacctatttatgtaagccatttaagtaaagcagttcctagttaaagcgatatttttagacatcacttctccgacgaatttccttctttagtgcccccataagtaattactgataagcagacctctttgccatatgttggctcaaaaaataatgaaggaaatacccctatgtctactaaaatgactggtttagttaaatggtttgatgctggtaaaggttttggttttatttctcctgctgacggcagcaaagatgtattcgtacatttttctgcaatccagagcagcgattataaaactttggacgaaggccagaacgttgagttcagcatcgaacaaggccaaaaaggcccttcagcggttaacgttgttgcgctgtaagtaaacccagcttaggctgcgtttatagttgggaaattgcgatagcgatgatggccatgccggagcagacaatttagttctcgatgagaataccaacaccttgagacctcgctacggcggggttttttgttttatggatattagtgattacgtgttaccccgccatatttatccttttctgaattcttagtgaaaaaactcgatctatattgtgattaggataaatgcatactcagttatcttttttatattcagacattagccacgttcgaaaaagtagaatatattcgaaagcgattgtttaatcgccagcgggctgcttggtataagtacagtctacgcacctgcgggtgcacgatttttacgttatggatatatcaacattttcactgtgtaagggagtagggcgtgaactggaatgaaatagcaatatcagcggtaataggcgctgtattggcaggcgtggcttcgctgttaaagaaaaatggaaagataggtaagttttctggagttatgttggttatcatccctattataattggtaattttttttattataagtatattaaccagaatatcgatcgtgctgaagtggaatattctctagggaaatttgctgtttaccaaacaataaagcagcaagaccctacgctatatactaatctggttaaccgtctggttgccttaaaatctggcggtagctcagaacaagacattattgatgaaattaagcaatcggtcgccttgctgacggtaagtaaaattcaaagcgctccggataagaatgttgttgaatatatgaacattattctggatgagcttcatttttatcaggaaaatgacaaaactcatcagctttgctacaaagcgctttatccacaggttgaaggcggcgttaatacggtaaaagaattacccgccactttagtacaacgcgatctggaagcgttgaacaacctgtttacagcatcaaccggaaagccaataaaaccagagaatgagcaatataaaagccaactggaagccattgtgcagaaattgcatcagaaatatggtgatgatttactgatgctgagtaatccgaccgctgccaatgtggaccgtaaaaaggtctgcgatatggctgttgagctatacggcaatgtattgcgattgccacaaaaagaagctggaactatcatcagaacgatgctggcaggcgaatagaaccgagacagtgaaacagccaattgctttacagacaggtaacaagccattggctgggaatatcattttacggggtagttgacgaaaattaatcgtgatattttttaattaaataattacggttaatcataaagttagaatgttaattatcacgttatctgataaagactccccatactgattgagatacagataatcttaatcagtatggggctatatacctcaatttttgatgtgaaacatacctaatatccatttgataatttctaatattgatttgtgaattgtgagattattctgaatgcaaatcaatcatttcaagacagatgtctaatgtattgcttcttgcctaatggctaataaaagacataaaactataccttaatccaaatttatcggttttactgctgattaattattgaacttatatccgctgagttagtgtcactattttttaataattaaaataatcacaataagacgtaacattaatgttatattaatctggaaaagttgaagtttgactgattccctactaatgctgtgtatattttttgttatctaaaatcatagtgagcaaaaatagttattcattttgtcattagtggaatttagcttcaccaccaggtcacagacttaaattttcacctgcatagattaaaaaacaaacaaatagagatgtaattcaatgagaaaactactcgtcataattttctgtttgaacttgtttgccgtaaccaaacaagccgcagcagaagatggaaaaaccgtagatgttgtattaatcggcggcggtatcatgagtgcaacgctaggcacctatattcaagagcttgagccaacatggtcaatcgatatgttcgagcgtttggatagcgtagccagcgaaagctcaaatggctggaataacgccggtactggccactctgcattagctgaaatgaactacacgccagaaaaagacgatggttctattgaaacagcgaaagctattgagattaatgaagctttccagatttctcgtcagttctgggcctatcaggtaaaaaataacgtcctgcacgatccccgttcatttattaatagcgttccgcatatgagttttgtatggggtgacgataacgttaatttcctacgcaaacgccacgcagccttacagcaaagtacgttattccacggtatggaatattctgaagatgctgagcaaattaaaaaatggatacctttggtaatggaagggcgcgatcctaaacaaaagatcgccgctacccggatgccaattggtaccgatgtaaactttggtgagattactcatcagttagttgatgcattgtcgaaaagcgataatttctccctaagtctgggtcatgaagttcgtgatattaaacgtaatgcggataagacctggagtgttaccgttgccgatctaaaaaatgatggcaaagaacgtacggtgaaggccaaattcgtctttattggtgccggtggcgcatcattgccattactgcaaaagtcagaaattccggaagcagataattacggcggtttcccggtgggcggcgaattcctggttaccgataatccggaaattgtgcagcgtcatttagccaaggtatacggcaaagcggctgttggttcgcctccaatgtctgtcccgcatttagatacccgtatgctggatggtaaacgcgtgctgctgtttggaccctttgctactttctccagtaaattcctgaaaaatggttctctgtgggatttattcggtactatgaccttctctaatatcatgccgatgacccatgtaggcatagataatttcgacctggttaaatacttaatcagccaggtaatgctaagtgatgaagatcgttttgaagcgctgaaagaatatttcccggaagcgaagcaagaagattggaaactgtggattgccggtcaacgcgtacaaatcatcaaaaaagatgaagagaaaggcggcgttctgcgtctgggtactgaagtggtcacctctcaggatgggactattgccgcattgctgggcgcatcaccgggggcttcaaccgctgcgccaattatgttgcacctgcttgaaaccaccttcaaagataaagtggcttctgaagcgtggcaggctaaattaaagcaaattattccatcttatggccagaaattgaatggcaacgtggaaatgaccaatgaaattctgggctataccagcaccgtattgcagttggataatttagcgccgcagccagtggttgaagctgaagttaaaaccgaaatgaaactggaacccgtggccgaagctgtccactgattggttttaaacgtaccaatgatgctagccggagagcgatcgtttctccggcttttttatatcaaaaataggctgattcttttccttttcatgctgattgaggcgagtttccctcagatattctgcggattaaatttacccaaggctacacaaagcataaactgcggtaagaaaaaaattgcattgttacgcggtaaaataaaataatactcaccggtcatctatcaatagaaaggaatcttatgtctggtattttatttaaaactctctcggtattgtccttgagttttctcccgctgcaatcatttgcggatattgcggtaatcaaaaaaaacaatatcaaaccgggcaatatagaatatgccaaggtgctgtactccggcgatgtgacggaaaataagaccgtagaattcatctctgttctcgatgaaatcaatgctaattacccaaaactgaaaaaaatctatgtctacatcaatagttatggtggtgatatggacagtggctatatggcttatgaggcgattaaaagctcaccggtcccggttactacggtgaatttatctatggtcggttcctctgcaaccttattttactgcgctggtgcggaacgtctatcaatgaaaggagcttctttcctgctgcaccctgccgccgtggctaatgaaaacagcaacttcctcaagcctgacgcactaaaaaatatgcaagaggcggtgagtatatataacaatatgttcgatacggtttataaagaatgtaccacttacaccgatgctgagcggaaaaatattctttatagtgaaaatggtcgcgctttgatcaattcgggcaccgcgatagataaaaagatagctaacgggcttgccaacggattttctgatgttcagatatcttattacattactgaaaaacccaatcagtaatagtgcttaaggcttcaatgataaaagagagcgctatagctctcttttatttccctgccggggtagatttgtcgcgagagtattagggaaacgacctcgatttcagcgttgtattatttggctaattctcgttgatagcgtggtacagcattcccgacgcaatttataaacataaaacccgccgatatctgcaccaatgatatcctctaagtattgactactatattccagcgcagcccctgaactcaggcataaatatctttctcactgccagtactggggcgttcccctgccgaagaccgtttcttaaatgcactcttaatgcatcctcttcgttataaaaagaagtggctacagcctgataagataataagagaaccaatcccaataatatatttattttctgagattttccctctggaatattatccaaatatatagggtttctgcgttcggaatttctggccactccttattatcagagtggccttttggctttaaagggcgtttttaactaaagaacctgcgccgatttctgcaatatttctcgctccggtgagcgtcatcgctacgcgcatttctttatcgaatagctccagcaaattagcgacaccggcttcaccggcggcagccaaagcataaacaaaagcgcggcccagcatcacgctgtcagctcccagcgcaatcattcgaaccacgtccagaccgctgcgaattcccgaatctgcgaatattttcagatcgccttttaccgcgtcagcaatggctggcagagcatgggcggtagaaagtacgccgtccaactggcggccaccatggttggaaaccacgataccatcggcaccaaatcgaaccgcgtctttggcatcctccgcatcgagaatacctttaataatcatagggccttgccagaattctcgaatccactccagatctttccatgaaattgaaggatcgaaattagtcccaatccagccgatataatcttccagattggtcggcgtaccgcgataggccgatacgttgcccaaatcgtgcggtttgccgcatattccgacgtcccatgcccattgcggatgagtcatggcctgcaaaatacggcgggctgccgcatttgggccgctcatgccggaatgagcatcgcggtaccgcgagccaggaaccggcatatctacggtaaatactagcgttttcactccggcagctttggctcgttcaagcgcattccgcataaaaccacggtcttttaagacgtaaagctggaaccacataggccgatctatagccggtgccacttcttctatcgggcaaaccgaaacggtggatagggtaaatgggatcccttttttagccgccgctcgtgccgcctgcacttcgccacggcgtgcatacatgccggttaaaccaaccggtgccaaaacaaccggcattgacaaagtttcatcgaataatctggtttccagactcagctcggacatgttttttaacacgcgctgccgcagtgcaataccggctaaatcttcggtattacgccttaacgtatgctccgcgttggctccaccgtcaatatagtggaacagaaaaggcggaagtttagcctgtgctgcggcccggtaatcggttgaagcggagataatcatgatctgtaccttagtttgaaacgttaacttaatttttactctcagggagccagaatcactgccattcctgcggctatcgcaccgtaaaccagcatgggcagaagcgtttttttgatgattttcccctcggcgttactgaggcctaaaatcgaacaaacggcgataatattgttcaggcacaccatattacccatggctccacctacggattgtagtgccagggttagattgacattcagcccgctgctcagcgctatggattgctgaatcccgccgaaagtcaggttagacacggtgttcgaaccggagaaaaacgaacctaacgccccaaggaatgaagagaacatgagccaactctcgccggtaatagctgctaactctttaccaattaaaatgacgggagcgttgtcaccgcccagcatcatcatattgaccattaccagcgcaccgaagagggcaataaacggtttggatatccgtgatgcggtttcgctaaacatatgtttaacctgtgtgccgctcagcctaaatagcggaatacacagcagaaccactaacaggaaaggtatcagcgccgggacatacagggttttgtaacccgcagctgcagaggttcccagcacttgttgtaagttgataatcaatgccttactgatgcttagctcacctagccagcctaagctgccttgccatagcgtagccgtattattgagtaacgcttttagccctagctgatgaatgcgggtgacaatcaaaatggcaatgagtagcaaggtcggtgtcatggctttgatcacctgcaagaaaggaactgccgttgccgtatcttttctatccgttcgggttagcccgattcccatacgtgccaacaatactgaaagcgctagaccaatagctccgcctatcaatgcggggaattcatagttaacttgcgctagcagtaggtagggaagagtgcagctcaatacgctgagatagatgaaaatcaggttgccgcgaatttgctgccaagaaacgataaaacgtaatgccagcaatgggatgacaaaagcggcgacaaaatgaatcagtgcggtttgacggccgatttccagcaggctttcatcggaaagaccgaggttagcgaagccgaaccaggtaggcgtgccgacggcaccgaatgataccggcaccgagttcataatcagcgtcaataaggctacgcgtagagggttgaatcccagcccaaccagtattggtgccgcgatggcagccggtgtgccaaatccgctggcaccttcaatcatgaatgcaaatgcccagccgataatcatcagctgagcaactgggttagggctgatattttccagccagttacgtaccacgttttctgcgccgctaacctgcatcagcttattcaacaaaattgcgccagcaataatggtgataggggtaaatacggaaactagcgcggtaataatattggcgtgcagcaacagcggcgcgctgttgaaccagaataattgcacgcaataaaccacgacggcggtcagtggcagagcgatataggatgggattccgttacgcctggtcatcatccaaatcaacagaacgattggagaaatactaaaaaaaagggacatatcatcctcagggttattatttttttagatggatagagatgtagccaaaaggttaattagctaaacattattattctaatcgcaacctttgcagatgtactacgctgcattttcgcaacaattaattagtgtgaaatttaggcataattcaacaatccattcaggaaatttattttcaaataacttttaataatcagattgttagattgtttgttttgtgtgaggaatgtgttggttcacattaattaggcaggattaggccatagactatatccaaaaatggcctaatcatcggggggaatctagcgggaaaatggggtaatcagatgatattttcaaaaatagtggctgatattcttataggaagtaatgatatgctcgatgagcaggcgggttttcaacggtaaattacgggtataaggataaactgcataaacgcccaaaactttaccgcagtggccagccagaatttcgatcaattttccgtcctgaatatcttcatacaccatacaacgcggcaccatagcaatgccgtgaccgctgataacggcttttcgaatggctctggcattatttactgacagatttccattcacctgcatttcatagatttcgctgctaccgggttgtttcattaaccagttggctgtaccactttcctgataggtgtaagtcagacaattatgattaagcaattccttcgccgaacgaggttctggatgcagctccaaataaccgggtgaacagacaatgacccagcgagaatcgagaataggacgcgcaatcaggctggagtcaggcatggtgccggtgcgaatagccagatcgataccttcgttgaccagatcgacaaagcggttttccagccgcatttcaatcttcaaattaggatgttggctacaaaactcggccacgcattcgctcagcagtaattctccagaaatagtgggtactgacatacgaataacgccagctaactcatcacttttttcactgaccgcatacaaagcatcctgaattttggtgctgatttcgcgtgcatggcgatacaacacctgaccattttcggtaagtcgcaggctgcgcgtggtgcgataaagcaggcgggcacctaaagatttctccagacggccgatacgtttactgaccacggaactggtgataccggcggcttcggctgctttactaaacgaaccgcaatcgacaattaatacaaaaagaatcagatcgttggcatattcgtgagtgggtaacatagcgtcctattcttctgtggctccactgattgacacagtgtaagacctcttggtcaggaagcaatatgcattggttatttggttgaggtgataggtaaagcctgtggtgttcaatatctgtatgattttattaaaccaggtgtgtaagaaaaataatggtaataatcttttaaattacattcaacaaacttaggctggtcatagtaattacatcgctattttttatttcttaaccgaaagcatataagccataatttaactttactcgctttaaatatcatattaacttactccacctatgatgttaatcattaggataatttccatgtgagaattaaaaaatcatatctgtaatgagcatttccatcttcaagcagttttctcgtgagaaaacaagcatatctctggttgagttcttggttatatcctttgtaataacaggagtgaggctgtatttttttcgtgttatcggaaaataataaagcatcgagaaaatttttctgttggatttctttcacaatcagatctttattgatgtcatcatgttttaatccagtcgtctttttcatatcatgaataaaggttctagcactgtcatcagcaacattaattgtctggcggcctgaagccgtaattccagatagctgtaacccccccaagggccaaatttagcgatataggtaatcttcttgttcaatctggccagtctggcggtgggatcatcggctggtcgatatttttataccttattgatttatggcttatatagaatagaaccgcatgacctccgataaatcgggataattgagacctatcactaatattatctgatggcgaacaccgcgtagcgaacagagaggaggggactaaattctgtttttggcgaaaataagcgtcaaatgatacttttttcgccgggttttgggttgtctgaattgtattaaaactgccgtcacagccgtgactatcgccggacagtggaataaaaacgttcccgctgcctaaacatcgagtgatctactgtctgtattattcaattctgactcggaaataatatattggattagctgatgtaaattagttattttctgagatgtcaataactcgggttttaactcaatattataatctttttgtatattgaattgaaactctacaaaatcgaggctatcaaagccaagttgcctgaaatcagcattcggagtaatttgatcttcctccagatctttcatggtaagaatccaatctttcatcgtttcaaaaacctgattttcattaaacatagcttgtccttttaatggtttataatttaagtgttattatttagactgaatttgaattcctatatctgactgcataacaaattgtccattgataatgactttaagttgaaataaagaagaaataatattttgagaagagctaatcataatcggttgacataatctaaatcgaatgttgagagaggaatccaggcctgatattttcactttaaagaagtcgggtgcaaccaaaaccctatgggtggtttgtaatactctcagttcagcgaatagatcgctttgctgctttatttgtgggttattaagtaaatggcaaatgttaacaaacagaaattcactctgcgaaaaacgagtgaaaacaagagagtccataaaaagccacgcagagtcgaaataggggtatgtggtttcgaataatgcttttttctcctcatatagcgagtgttcaatgagaacatcttctggggaatattctgtgattttctccatgggatgcgttttataccggctgcccgtaatagcttcacaagatctatcttcagagaataagagaaagtaatcacgctgatttttcttttttattgccaattcataatgaagtttttgtaataccggtgaacggaataaagtttttatcgcaacccaatcttggttcggttgtatatcatctagacttaaacgatgttggatatgcattaaagctaacattccatgggcgacaatattcgcagaacccattgcctgagcgtgagataagctaaagtgaataggattatagtcacctgaataatcggcccagtctgcaatagcttgttcatcgaagtagagcttcatatcaacggaacctctcaatgactagcacggcattggccccgccaaaaccgaaacttaggtttagtgttgtatccacgggactgttctttttatgcgtcagcggtaagtaattcagatcgcataagggatcgggctcgattaaattgactgtggctggcaatatctcggtttcaatcgctttcaggcagataattgactcaaagctacctgcggctgaaatcaaatggcctgagtaacctttcgtactggaaatagggatatcgtaagcggcctgtttaaatacggctttaatcgtattggattcattgaggtcatttagctgtgttgaggttccgtgggcattaatatagttaatctcggttggcgatcgaccagcttgctgtaatgcaaataacattgaatcaattcgtgcttgcatgtctgtagccggggaggtgtaatccgtggcatcggaaaaattgccgtaacccgtaatttcgccgagaattttagccccacggttttgagcatgttccaattcttccaggcaaagcactgctgccccttcggccagtacaaaacccgaacgacgacgatcaaatgggcagcaggcacgacgaatatcgctctgctctctgctaagcgcattcagtgcatcaatattccaaatatttgtttcatgacgtaatgtttctgaaccgccagcgagcatcatttgagcgcgtccctggcggattgcttcataggcttcgcctattgcaatagaaccagtggcgcaggctgcacttatcgtattttgataaccccgcatattccacattaacgtacaggccgcggtggcaatactgggcattgagatcagcgtgcctaatggattaccaaagcccgtatcacgataactatcgcgtagaatatatgcttcatctaacccgccccaaccggtgccaatgatggctccgcattcgcgagccgcgtagtattcggctatggcttcaggttgtttaaacgccataagaattgcttcataggctgcaaccaatgcatttttggcaaaaacaggcagtgcgcgggaaatacgtttaggaataaaaccatagcgttcattatattcaggtaaaaatgcaaagaatttagctttaattaacggattcttaaatgcgtagggtttatagcctaaattcccgttcataatagatgaccatacggttgcgctattttcccccaaagaagttaaagccccataaccggttaccactactctccttttgttcatgccaatacctctaattaatatattaggcggaaatggatatatgccttgaaataatcaaggcataaaataaccactatcggttgctaataaccacatcttgattatttattgtacgaagggagaattgatgcagattaccaaagttatcaataatatcaacagatacctggccattaataataatgttctggttgttcctattattgtaatagttaattgcacgaatatcgccatgtccatgacgtaaattaactaatgcagaagagttatcggatcttatctcattaacacgaaggcttgttctatttctagccatccagccgctggtataacggcccgaatcgaagaatatcctcaagttattacgtaaagtagtattaccagaattaaacgctgtatccgaatggaccctgactcctgaaggtaatgtccaataatacacatcgacctgcgcccaatgccctttagaatcactacgtgaatggccaatatcaacatctctatttagcgcagaggcgagaattcttaatggtggcacgggaaggagagaaatagagctcgaaaaaaccataccatcagcattaaaactagtcgtaataacccggcgttgaagttgattattggcgtcacggaactggatagtcactgcagccataaatattcttgtttctacccgttgatttgatcgcaaataccggaatatacgcgtggcacctgcgaaaggttcggggccagatcgttcggtattattatcgatttctctatccatctcttcgtacgaaagtcctcttataccttgcgaatagccgttgggagcctgatcaacatcccaaccgactggcaggttgtcccgattaatttcgcgaacggtgacgctccttttttcttcatcattgagatcgacattattccaaccgctcccgctgaattcctgtttttgaatcgtgatcaaaactggcatttgttgacgaccgttagcataaaactgattactgccgggtaaagtgatcgtaaactgactaatattcacattattcattttaaaccccgatattaatctttgaaaactgagaagccataaaatggcggtgagatttcctttatcatgtcgactttaactctgtccgttaatttttggtcggcattgaatacttgatgctcaataaaattactgaactgactatctgactcaaaaaaatactgattagcgctagggtaattttcaaaataaactttaactgctaactgcagcatttttgcaaactctatattttcataattgaatctgcttttatctaatacgcagatctcagcgaagccttcttccggggtggttcctccaaaccaaatagaaataaatctatgatctattttaggtatgaaataatatccatccccatcagttgaaaaattatcattaaaaaatacttcttctctgaagtgtgaaggataaacaaattcaataataattttatcgccattgaccattatagggacgcattctctaccactagataaagcatgcacctgtccatgccaattagagttatcggctgctctgaaaatggaattaataatgttcttatcaataaatctcatagatactcctgataataaattaaatataagcctgtattataaaaatacaggctgactggataagctaatcatgcataaataaaagtgatgccaataatcaatatggagatataaaaatagaatatctaggtgctgcattgttttagcttgggagataacaaattaaacttatatagaataaacctcttcaatagccgaagctcggattcggcctacgtggttatcaaattcagtataatattcatgtgcgctggccagcgatccttgcatagtatcaattgcgggtaaaaacggattacttcgtacttcggcatttaaattactcgatgaagaaggtgaggttgttgccaggtcgtgtgaagtattggcaatatcgaaaattgtaagagggatagaagcgacgcctgctacggttcctacgactctagcgaataatcctaatgaactatcgtaattagctaatgcttttaaaccttcgaaaagtcccatgcgggcggcaactgaagtagatgaaattcctgaaaatgtgatgcgttcggcgccgctacctgtggagaaaagaatggtaggcgaacgagcggtctggtaggtgcttcgcaccgttgctcccgctgaacctaagccagaaacaaaagatagcacgccaaatgttagcgatgcgatgcttaggcgttgtattgtgtcacttcgatcccatccggcacgagcatcgacttcttccattgccgccgctgcaattgccagggtgctgctgactattcctaatgcgccgccagtcacgccaagaaccgtggctacggttgcccctgctgccgcaaagccgaccaaagcataaccaaaagtcagaacggtaagtgcagtaccgatgccaattaatagccaggttagccatctcggcatttgaatcagtccactgggatctctgaaattgatgggatcgccgttgcaataaccgtaactattaatacctgctgcactgaatggacttaatgggtcaggtgaaaggaaaatcattagctccggactataaactcttcgtccattgcccaaatgatagagttgagtcattggatccagcttttcgccattgaacgccgggcgactctgctctagcaatgaaatatccagattatctgaatcaattatcgccatgccgtaaggggaataatgggtctgtttaatatcattactctgcccgagagcccctcgaatactggcggcgctgtcgctaatatataattcagtgccttgagtactggtcgtgcgcgccagcacattttcttcctgcctgacaaaacgagacgtgttatttccctggctggcgccaataattctattctcgctataatggaatgctactgtcgtattagcgttggcgctttgttttatttgacgcccctcagcgtcatagtgatagcgagaaatatgactttcattttcagtaacattaattaaacgctctagttcatcataatgataatttcttttaccatcgctgagtaaattaccggaagcatcatagtttaggtgtagtacttttgatggattggtatggcgtatttcagttagctgagtggggtcgcgtccctgaaaactacgggtagaaatatcctcagtaccatctgtaaattggctgataacctgcgttatattatttaacgcgtcataggtaaaggcctgatattgaagactacgcccattttgatctttagaatattcagggccgctgcatgaataggtgattaatctgcggtaggcatcataaaggtaagtctcaccaataatagcgataccttgggcgtttgtgagcatcttggaagcaatcaggccattttggtgataggtggtagttatggtttgtagcaatgcgccattgtgttcgatacgtcggatagattctcgcccagcctcgtcataagtcacccccgttataacattgccctgctgagcagaggtatccacgcggctaattcgactaaaacggtcataatgtgttgtaagatgtaccgaacctacgctggctttttcaattcgacctgcggtgtcataactgcgcatttctttatctcgcagagccgaatcagcggtaattaagcgaccggcaggagaatattgatagttattggcgtggctttgattatcgaataactgtgtatctttattgagatggccgtacgtatcgaaatgtaattcgcgcttaaattcgttattactggtgtgaatcaaattgccagtcactcgatcaaaatcaaattcactcgtcgttacgctgccgagtttaacttgttctaaagaaaggagctgcgcattatattggaaattctgaatgataccgcgtggtgaacgagccgaattcggttgagtcgaaccattaagatatgaccaggttgattctcctgcgttgcctctggattgtttcgttaatctgccaacgccatcataggcgcggctaccaactaagatcccatctacttttatcgcggttttaagtgcttcaattgaatgagaaacaaattcggtttcgattactttcgctgaggttgcatcggcaggtatgtaactttctcgtaccaaacggtcaaaagcgtcataactgaaatgagttcggtggccatcgatatcgacttcagaaatacagcgaccaaatccatcaaaagtgcggttgaagtgatcaacaatgccgccaacgctatcaatttgttggattcgagtggctttatcgaaggcattaaaataagttcgcgtatagtgagtgccttctataccttcagtgcgcactcgttgaatcggatcgtaagcattcacgattacgctgccgtctgggcgtatagttctttctagctccccccaaccgtcgtaagaataaactgaatttaatgctaactcctgtccgctaatatgatcataggctgtttctgaaattagctgacccaatctattgtaggagcggcggcgcagtaatagttctccgttactttttatgacgctgctagacagattacggccaaaaccgtcataacgcgtaatatatcgctcaccttttgcatcatttatcaccatatttgccagcgcgccggaaatggaaaaatgatattcataatgccgacgagcttgattttgtgtattaggcgaggctatttcagtgacgagtttttcattaatatcgtattcaaaaaccagcttaactgcgtcttctttttgaacctcggtcactaggcggttgataagagatatcgtccggttagatgtcaaaaatgtagcatcatacccaacaatttttcggctttcagttaaacgatcaaggttggttgtatagctaaattgtgtgcgagtcgtatggctatttaaagttgccgcagattcctggattcttccatgcaaagcaatattggagaagttctggaggtaggttaaacgggacgtaagattcccattggtcgcacttgaagcgtgcaatacataattggcatttctacggaagttggctatttgtatataagtatgctgggtgactcttgtagattcattgcctgaagagggaaatattctttcttctcttttaaatcgggtaaataaaccgtgtggctccggtggacatagccctgcaatgccgccaaccgggaagtaatcagattcatagcgaataccagaggcttctgtccgagataactcattaccaaaatcatcagagatcattctgatagattcttcacgattacttgagctatttcgtatttcaaatcgcgtgagaatttcttttggtaattgcagattggccggttgatccgtaaacatcaccccagttatatcattgtaagtatatcgacgaatcagcctcctaccctgtttttcggtcgtttcgagcgttttaagatggaatcgattaaaggtaatttctctagattgcagcacgctattgttactgtcgagtatctgctcagtagttgagtaattgtattcgcttctgactaaatacagattgtcttgcccttgcgcaaacccgccgctgaagggaaaaccggtgaaattatgagtgctaaaagtgaactgccgtgtcatatcagcagtaccgccattcgcgcgatgagttatctgaatgacattaggaataaatgtgttattagcatacgcatgcccgttctcccgataggtgataacgtcttctccgcccataggattgcttaaattgttaatagcaatgaggccatttctaaacgtttgatagcgatatgtgtaggccggaagagtatttggattaggcggtaaaacatttctgtcgattgggatcgttgctcgagttaagtggccattcgtatgcgaaaaataagtacgagcgacccgattgttatctttcaaactgtcggaaatactgattcttccagtgttgtattctattgataatatttctctaccgctttcttcatttactatttttgacaggaaacccatgttgttatattggaatgaaatgtgctcgccattttcaaatattatttgcgctattttaaatgagtctgatggtcgcggtcggcgtaaaacatcaatcatgccgtctttataaataacatggagagtattagcatcatgtcttcttacggctatgtctttcagtttacgatctctgattctcatatatgaattgatgggaggcagtgcatcggtaaggaaactttcgccgcttaatagccttaagcgagatgtagtgctatcaaattcagtattactgattgaccaaccgagcccatagccggagtcggttgtgtccaacatagaaaagaaaatttttatatcacgactgttttctacagggccttcagggtaaatcgttgctaaacggataatactaccatattgaccagtacgctcatcgacatccgcactgaggtaagagctgaagttgaaggcattagaatatacttgcatattgatttcctttaaataatttttgcgatgtgatttatttaaatacaattaacaaagtatttttgtgacatgcttgagtgtatttaaacaagcgtgatgacattataattgaatggccgatggggctataggatataaaatgaaaaattaaattttaattacagtttagggttaattaatttcttcaataaaggaataaaaaagagaattgcgaacttcgccattttcttcctctatcaaagtcttgaattttttctgttgctgagaatttaaagaagataatttattatttgactgatggttatttttattgagatgcgacactgcctgagaacacattggcaaacacattacgctatcaataaccgcttcactgatattggggaatccgccggcaaaacgaaccagatgactaatgccaggattacgctcaacttttgaaggagtatgtatctctgggttgaaatagataaacatgtagccggggaatagcggttctataacttgcctggtctgccctggccgatcggctcgagaacgatatgtccgtaatattgggctaaaaaccatgatattcaaacgctctaaagctatttgcgcatgtagtagatttttttttccgggtttatgacaagtgagataccaacgttccattatttggccctctggcaagaggtttattaacgaaagatgcggtatgccgggccaagctccgccaaaatcgtacccaaaggatagaatttgacagttttatctatgacgaagctcaaattaatcgccactgcagactgcatctagactagatagcattcataaagtgcgaggtataactatcatgagaaatactttagtaaaagcaaattatttctacaacctagtaaacaaacttttacaaaagctatgaatgaatcggatttttctgcaataaaatagctaatttacactgcctatctcaccgtttaattctgtatatataactttagaatcatatgtatctccttgtttcggttactgctatagggtttgaagcctatgtgtgaaattatggctataatgaccatgatattatggtgctgacttagcaaacgcatctgttatattcaattttatgaaagtattctgtatggataatgttaagtctggcgataaatctcagagagtaagtaggcaataaaaatcgcgattataaaacactataaaatttatgtttttaacaaaaaatccgataggtatatttgtacaaaaattatatcgaaactaagaagaactccacttttccatttaaaataaatgatattttatgtttgaaggctatttcatctaaattattagccttataaaaaggcttgtgataaataacgatttaagttctattttgtgcgtaaaccccggcttcggcctcgcgtggtaatgatctgttcgtcgtaaaaacgcttcttcatgggcatgtcctcacgttactgaggaagacattactaacatcacggtgtattcatcgcggcgagcaggtcaaaatggtgtgcgcgtctgttgtgagcgaaaagccgatgttttacttggtaaaaatagcatggagtgtcgagattacccgttgcgactcaagagttgcggacatcgcagtgttcctaggaaaaacttcaagcagattctaaatcttatcgtttgcaacctgcggccaaattcatcaaattaagccagtacgccccttcaactcttaattatggaagatagacatgatgcataaaaccctttcctgtgcgctgctgctcgtcgcgtcaggttccgtgtttgcaacgcctcaaacagaaaagaaactgagtggaattgttaataacgttgttattcctttgatgaaggaacaggccattcctggcatggcggtggcggtgatctatcagggccaaccttactactttacttggggaatggctgatatcgcaggcaaacagcctgtcacgcagcagacgttattcgaactcggttccgtgagcaaaaccttcaccggcgtactgggtggagatgccattgcacgcggtgaaattaaactgagtgatccagtgagtcaatattggccagcgctttcagggaagcaatgggaaggaattagtttgctgaatttggcaacctataccgccggtggtttaccgcttcaagtacctgataacattaccgatgaggcgtcattacagaattactatgaaacctggcagccacagtgggaaccgggcacaaagcgtctttattcaaacgccagtattgggttgtttggcaaattggcggttaaaccttcaggtatgagctttgagcaggcgatgaataaacgcgtgttccagccattgaatctaacgcatacctggatacaggttccttcaacgtgaagaaaaacactatgcgtggggctatcgcgatgggaaagctgttcacgtttctccaggtatgttggacgctgaagcctacggcgtgaaatcttcaatagaggatatggcaagctgggtgcgcgccaacatagcgccgtctgaagtaaccgatgcctcgctacgaaaggggattttgcttgcccagtcgcggtacttgcaagtgggcgacatgtatcaggggctgggttgggaaatgctgaattggccgatgaaagcagcaatcgcggccggtgggagcgataataaagtcgcactcgcaccgctaagtgcgacagaaattaacccgcctgctcctgcattaaatgcctcatgggtacataaaactggttcaaccggcggatttggaagctacgtggctttcattcccgagaagaatcttggcatcgtgatgctggcgaataaaagttatcctaaccctgcgcgtgtcgaagccgcttaccgcatcctggaagctttacagtaaagtaaatagtatggcccgctttagcgggccttctcaaataacgggatacttctaaccctgttgcatcacgtctacttaggtggccagttttagtgtgccactccaaattgaatagacccgggtttcgtagacacttttttgcctcataatggaggctcaatgaaggagtgtttatgtcagccaaaaatttcactgaagaattcaaaattgaagccgtacaacagattagcgagcagggataccctgtttctgaggttgcggcacgactcggtgtttctaccaacagcctttacgcgtggattaagcgttaccaaaaacctgaaccacagcgaaagcaggacgatgcccttcagcacgaagtaaagcgcckcaggcaagaacttaagcgtgtgactgaagagcgagatattttaaaaaaggccgccgcgtactttgcaagaacgtcaggctgaagtacgccttcattaaacaaatgtcctccttttatgctgtacgccggttgtgtctggttcttggcctccattacagcggttattaccagtggctaaagcgacctcaatctttgcgtgccaggcaagatgagcgccaaacaggtcttattaagcagctgtggcttgaaagtggtacggtttatggttatcgaaaaatctggctcgatatgaaagacttgggtgaacgcgctgggcgtaacaggatcgcgcgcctaatgaggcttgcagagttggcttctcaaaccggataccggaaacgacgctattacggcggcggaaagccttcagttgccagccctaattaccttgagcgccagttcattgttcctaccccaaatactcattgggtgagtgacatgacctatataagaacgcatgagggttggttgtatctggccgttgttctcgatctcttctcgcgccgggttatcggctggagtatgggtggacgaatgacagcagagttggtgatggacgccttgttgatggcggtgtggcgacgcaaaccagcggcagaagtactaatccattcggatcagggttctcaatatacgagcgaaagatgtcagcactttatgacagctcacaatttaaaaagcagcatgagtcgtcgtgggaattgccatgataacgcggtggcagaaagttttttccagttgctgaaacgagaacgcataaagaaacggatctataaaaatagagaagaagcaaaggctgatatcttcgattatgtagagatgttttataatgctaaacgtcggcatagtgcctgtgaagatcaaccccctgcagtttatgaaagygcctggttcatgaggcacgctaccgtctaggaaactagggtctattcacctcaaaaacaataaagctttacgaggtgcctaacaaggtgcctaaaaggttcggatttaattagtttgcttcagactcagcgggacaaattgcaggcacaaaaaagcccgcagggcttgcgccgtgcgggctcttaggactttatcggatgactctggtaatcatcgattgaagattttgggctggcgtccctgtaactagatatctatttgattgaattttctagataactgttgtttctgactttacctttggttctataaaggaaccataaatcgtaacggcatgaacccctgaaaatagtccgttggcaaactgtatcaaaaaatatcaaacctcttggttcaacttcctgatgtcatctgaactcatttcattggtcttcctttaacatgtcgattacgttagctacatacattaagtcttccgcctgttggagattgttatgaaaaactggtcagttgagcatacgagagaagtgaagaagtggctggacatagatacatatcgcggattcgaagagcttccactcatgcagctttatcatgaactacttgcaagaaccttgttcttcaaaccttaccatgaagaatttgaagcgaaggccgtaagcctctacatcgacaggatcttcaatggaaatccctttctcatcacagaaaagcatttaggttatctcacaagagaggacacattgtatcagcccccgcacttttttctcacaaccaccgaacgactggcacaactcagcatcgttggactgcgaaattcattgttcttctgggatggaagcgatgagtattctgttaacagagaattcctcgatagccctgtatcggaagttttgccaaaattgttcagagatacggtcatggtcgaaattgacctagcaaacgggacagatgaagagatcgctgaatcactcaaagctgcacttcctcaatggcgtaaagtgcgtggtatagaaccagatgtaacggaagctattcgctttggttatggaacgattaagaaaatcatcaactacagacttataccccttattgatatcttggtatggtcaaacctgcaccaagttcgtgtatccgaagaccgcctttcccggctcctgtacacggatgatgatgatgaagaacaaacccgcctgaaccaccaaatcagggatacggacagaccccttgctctgaaggccgcgagtataccgttcatccgtcagtttcatctgttcatcaacaaaaacgaccacctaaaaaagatcagagtttcagacgtgatgaaaatcgctgattctgactaagaccaacctccattagctctggcgttctcggcttcggtctttttcctgctgattcatttatatagtaattcccatcgcaactgaaatgaggaataaaatatgaatcagcacaatactcgccttattcgtttaccagaggttctaaatcgaaccggttatggtaaagcgtggatctatcatctaatcagcaaaggctgtttcccatcaccagtcaaaattggatctcgtgcagttgctttcattgaaagtgaagtagacgaatggattcaattaactatcgaaaattcaagaaagcatgttgcctgaaataaattacagccttcttatttatgaagattaattctcaggtttgtaaagtttaaatctttaaaaaacctatatttaacgtaattctttacgtttttttaggcaggtcttacgccataggtatttaaaggtggtttcttaatatcgggtatggatacggataataatcttctttcataccagagaatagctcttttaacattaactttctttctttcttctaataatgaaagtattatatttttttctgcatttgaaatttcattcaacaatatagtgtcatcaatatcacattcaagtttaggtttgttttgttttactatgtattgacgccaatttgatggtaaatcaagtgtaagtcgagggattttactttcgttaaatactttattgtttttttctaagcatttatttttagcttctgtaagggaagtaaagatatctgatttatctgatccttctgtgtctatcactacataaacagtaataaagtcttttgggcatatacttaattcatttttgtttaaagaatcgaatgctttcttcgggacgggatagaataaataaggaacacatatcgatagtattttatatctgtgctgtgccataactcacctcgatcaacggaatgaaatctgattatagccaagttaaataaatagaacaacctttttaaaattgacaaaaaaatatattagattataaaaatataaaataataacaaatagaggtaaaaatatgttcaatgaattagattttaataaaatactaatatcttctgagcgtcgtatatatttcaatggattcgaacatgcctttttttcttacgatggtgtaaaacctatccctgaaaattttgataatatgtacttaattactaagatgaatttattaagagcacaagcaaaatcaaactttatatattatgaattatatgataataatgtaattcacactgaactatttcaaaataataaacttaataaaaatgatttatctattgatgtattcacagacaaatatataaaacgatttttacatgtaatagaaatgagtaatgatcttgacaataatgattgggaaccatatattaaatttttatcaaacatggaaataaaaaaatcattttatgcattacaatacaccatactttcaatgcctgttacttcgcatataccacaatatttggttgaaaagtacctgaataaattatctgaagaacgagatatgcataaaaacaacaacataaaatatttggaacaatatattttaaatctctttgatctaaaatatatatgcattcattgatagaatctccaatgaagtatttcataggtataccgatccttaggggaatcgatagatattcctgtatgtcgataagatgagctagacgaaaaagtactgctgcatcattcgcttatagcttatcttatgcttgcgttgataagaattgcccccatacttgtcctctcataagaagtaaggtgttcatacacacccccaacagctcatcatctctctaagttgctcaacgtattgaaagcgagtgcaggcttccctgacttcaatggtgccaacgctactgacccacgcttcttcgattaagtcagtacagaatcctttcgcattgtgattactgaagggatacatttcatactatgagccactaacaactctttgaaatccctgcgttttaacgtcatgttagcttcttagcttcttagcttcttagcttcttagcttcttagcttcttagctgtttgccgattcaagcggcatatgaaaatcagaaaacattattgattatcataggataagcagcatcttttttcggaatcgccattcagatgctaacatcctgtaacatattaattaaatggtgtatcctcatttctataggaaaaatccgctttaaagcggttgctgattgtgattattagttttgtggggcaatggcaatgtgcgaaagggtgttaaaaaaagatgtttattctgaatgggttatacgcaatagcctgtactggatgacttcgcttactcagtggaaactctgtgaagatatatcctcctggacaatctcttttgaaaacgatagtcccgaatgcctctatgagttcgagaggctgctgaatgattacactttgcgagaaaaactacagcataaaactggggcgttgagagattctattgtccataaagtgcttcgcagtgtcgatgaaaggctatcgtaatggaattgatgccattcaattttgacagattgcctaatggacaggtgtttataagcaacctcgctggttttcatcacttcattaatgagcaagagctgcttgatctttctaatgagcaaatcaatgcggagcaatcaaacgcactagaaagcaagctgttcataaccaacgaaagctcatcaggtatcgctccctatgctttaagttctgcttttgcaaaacgattgatgaatgaactggcgatcaggccaattttcatgattgtgcccacattacgttgcgaccatacctgcaagtattgtcaggtcagtagagcttcagtgaacgcctctggttatgatttagatcccgctctcatccccgatatcatttctactatcaaaaaactatcaactccaccttacaagatagagatacagggtggagagccactcttgcggttcgatttaattcagtctatctatgagcaatgtgctgaaacgctgggaagcaccgattttgagatggtggtagcttcaagcctgtctgtcttgaatgaggatatgcttgaatggtcgagagacaggaacataacgttctctgtttcgcttgatggtgaggaagttgttcacaacagtaatcgaattcttggtcatgggcttgcgtacagtagaacagtgtcaggggtagaggctatcaaacagtctttaggcgctggtcgcgttgcaacggttactacagttactaaagatctcattaggcatcctgaatcgattgtccaggctcacttgtctcttggcctcaaggacatgtttatccgacctgtaagtccctatgggtttgcacaaaaagcatcgttcacattttctatgaaggaatacttcagtttctatgcctcgttgatagatgaaattcttaagatcaacaaagaagggataagggttgttgaacattcggcctccattcatctgaaaaggatcttcaatcccggttttagtggttatgcggatttaaagtcgccaagcggggtcgtgcttaacagtattcttttcaattatgacggtcgagtatatggtagcgatgagagtcgtatgttgcagaaggtgaaccctgaaacggagttcagtgcgggtgaggttaaaacgctatcattttctaagagtccttactataacgcagtgttgagttcatcgttcaattttgctctgccgggctgtgatacatgtgcatatcaaccattttgcggtgcagatccatgccagaacataagtgtacagggtgagcctgtcggtgataggagtcgttcaacgttttgtcagtatcacaaggggatgttcaggtatctgatgaactgcatctcagaaggtggtcagaaggctgagatgctaaaaggatgggcatatgtctgaggttattaggaacgatatctttcattttgcttcaaaaaagaatgtgcccacggggttctatcggttatgcaaacaaaaaccaatgaaccctttattctttttacccaatttactggtagttgctgaaggcaataatgatgccattcaaccatgctttgatttctctgttattagcactgaattatatgagtcaattgaagatggagatattgggataatcaacaatggcaatatgatacgcgtaattctgtcccgcagagccaatcataatactgtcttagtaacggaacgctgcaataacttgtgtctgttttgttcgcagccacctaagaaatcaaatgatgactggctacttacccaatcagctcttgctatagcttcatttggtttggatggagttgttggggtcagcggtggagaacctttgctgtatggagatgatttccttcacttcattgattttatcatcgagaattcaccagatactgctttgcatgttttaacaaacggacgcaaattttctgatatcaactttactcaggaaatggcaaagcgaagcaaaaagatcaaaatcacctttggtatcccgctctactcatcaagaccacttgtgcatgatcatctggtagggaatgatggcgcatttaatgaaacggttaaggggttaattaatgcaggaaactcagggattaatatcgaacttagagttattccgacactggctaactatacagaattggatgatattgtagagttcgttggccgtgtgttctccaacatcaatcagatttcccttatggggctggaatctatcggttgggcacgaaagaactggtcaacaatcttcattgagcacagcagttatagtgagaaaataatctccgccatagacgctgcgcacaggtcaggtatacctctaacaatttttaattatcctttgtgtcatcttcccgaaagagcttgggagcttgctgctcagtcgatctctgattggaaaaattactatcctaaagaatgtgatgaatgcactcagaagtcttcctgtactggttatttcagttcctcaacaggccgttttcatcaaccaccgagaccaattttatgaaaaaatttaattttgctgctctacttccgggatttttggcgctcaataattctgtatgggcaagtgattcatccaccggagcaagtgatttgcctggtatgactcttaatgaacatgatttagtgatagccccacttaacaccgaagttccattctacattgcagggcatcgcagtcatagctcccatcgaagccatagttctcaccgatcatcatcaggtggcgggtactatggtggcagcactccttattatccaaaaacatacagctcaccaagctcatctgggtcttcaagttcaggaacaagttcctcatcgtcctcttcctctgtgcgttcgcttcgttctaacgacaataacaactctactactacgaattctgttggaactacagaagctaaccgtgcaagtaatgggctgacttctggtacagagaagcgtaagcgcttaatcatgcgggttcaattcgctttgctggacaaaggttattacaacgggaatattgacggcataatggggccttcgacaaggcagtcaataaaaaattatcgcattgcgaacggactaccagtaccctcaagtgaaaccttggatacacagttgttaaattcattgagtattttagctcgataaattaagtatatttaaaattgttcactttaacattaacttgtatgaatatatatttcagaggcgattaaatgtcagtcagttataacatatatagaatgccatataagagtcttccagaattgacaaaaaaaatcattaaagaagggcttgtcgaacaaaaaactattctacatcaatcttatcaactcaaattttatttttctgataagttaaaaggaaatgaagtatggtggtgggatgtatttagtgatttctttaatgaagaaattgaaaagcctcataatatattctattttggcctgctaataggatttaaagaaaaggaccctgagaattgctatcttatcagtcttggtaaatcacatttttatctcagcaagtttattgaagcagactttgggctgaatgtggcaatgcgtatagctaatgatgaaaatattttgctcaagaaaagtagattcttttgtgggggaaagagtcaggaggcatcgtcatattcaaagtttgtgcaaggatcatattttcctggcgaatccatcgaacatcttaaaacaaaagccaaagaaactgacaagtggggatgtaataatataactttttctgattcaatacagctaagtttagatggtgcccctactgcattagtagatgtcttcaatgatattgattcttcgttggcaaccaaagagaaaatcgaatttcctaaatcggaaaaaatcactgacgagtcaaagatagatgagcttgataattatctacttcaatcgatcattaaagatgatgtaaatgttattatagatgagattcaatcttttggtgcctctattgtaattaataattctttgacattttttaaattgcacacaaaagttgaggggagtggaaagtatcttcaatcagcagataaggttaacgatataaaaataacagatgttaagcaatttataaaaaacaacgacataaaggatatcaataaagtttttgttaagataactaatgaaaataacagtggtcatacggcctcgctaaaagaaatattgagtattacttatagcgatggcagtgagcactacttccttaagaagggagggtggagtcgatttaactctgcctttatgaagtatttgtctacctctttagccagtataaaatttgaggttaaagatgctctaaaggaagacgaattcaaagcatggcaagctgaaaaaataaaacaaatcgaagaaggaacttctaaagacaaattagaatatagagagtactattttaatgaaaagatgtctgttgagaaaggttatatacttctagatcgccagctcaaaaaaataccatccttacgtgatgatggaaaggactacaatgttgaagttgcagatctttataaaaatggagagattattgctgtaaagatatcagataaaccgcatgatctaatttataatattgagcagtcaaaaactacaattcaaactatagtaagaggagtagtaaaatttgaagagaaaattactgatgtggttttatggatctcaactactacaaaagccaaaaaattgattgacatcaattctattcaatttttattagcggttcaaacttggaaggaagttgttgaaggatttaatttgaaaccaaagatatattattcgcatcacgaaaaacccaaaaagaaaaaggaaaagaaaaagccaaaaaacggttgattaaaaatattgaatttccttatcgaataatttcaggagagaaaagaacattctaattatcacattataaatattatttgagtgtattgatggatttaaaatcttatgtggtggtgttatgtgaaacttacaccaccattgtttattgaacatttttaagaactttcaaaatttactctggatgttggttataaaccccttagctgataagctgtggcactatttatgcaatcatagtgccctcataatctctgtacaattttatttgaaatgaattaaaccataattgcctcttaattcattatcaacaagagtaaagttcgtcatttctctgtcaagccaataagactcttcaatatgctctaacagtattatttggaaaccaccatgagaccgcattttctcaacaaaagaattaatttcatttagggctgcatcaagacttgcaaagtcatcagtttttttaccagcagtactaaaatatggagtgctgggctggtcaatgactaagaatcgtggaacccacggtacttttctatctcttaccaattcgtgaagtgcaaggaaataagctacatgtacatacatatagttagaagcacttccaatatctatcattttttcaacttgatttttatttatcaaatcaagtgttttttttgccttgttgaatatcggagttgcatcctcaaatccttttaaaggcatccgtttgaatatttcctttattttttcgttcagtaaactcaatgtatattctttaaaggcattattatctgttatcttgctttctaactcattaattttagtagttatcttttctatagtatcagtataatcatatttagggagaacaactatccgtttaatttcagagctgagttcacccatgaaccgataaagctcgattggtgtgattttttcatcactaacagttgcaagttttttactcaaggatgatattttaagttctaactcttttctcttagcatttgtttttgatatgagtgagttttgtcctttttcggctatagccttttttatctctgagctttggttcaataaggatttaatgattgaatagatgttttttgtatataatatttcgctataattatcatctaaatatttagctattaaaagagagtcttggttgtcttttaaaaacttcttatattcagtatttgtttctatatattcattaatgtctgtcagttctttttttaagaggaaaagttctttttcaatttttgttctttcattaattgctgggatttcgtttatattcttgtaattaactatcgctttcaaattttcaagtttatcacttacagttggttcattcttgctgtttccacttattaaaccaaaataatacgccctgtcgtatagtgattctatttcactttcgaaattgaaataagagtctttgctagccgactgtttatattcgatgcgagcaagattcctttgtaattcttctaaccgcgttctcattatcatagtttcggcgttttcactgccaagagccatgtcaaaggttcggtcaatacgctctcttgtctttaaatcagagattttcgaataaagatgttctgaagaggttagtgttgtttgatctataaagcaatgcgggataaaatatctataggatacttttgacccttgttgtatgaatctaccaccataagggatttttagagaactattaataccaaactcataattcagatgttcttttaaaacatcctttttgatattgttaatagggatttgtggaatgtctccatttttgtcaaagtaaactagatcatcttcttcaaagtgtgtcgcttttctacaaatagtgaaatatttaccgtttatacttaatctaatcccataccaatttacaaaattatcgacatttgtttttgatataccatcagatgatgaggataaaaggcaataatcaatgatagccagtatggaggatttccctttgccagaatcacctgttattacatttaccttattttcctcaagttctaaattcctcaaggttgaatcaatttgccatattaaaatattagtaatctgcattataatctaactccacaaatgtcatatatattgtgtggttcttctaataataaacgtgcaacatttatagatgctgcctgtatttttacggctcttttgccaataaacgggatcgcattatctaatattaacttgtttttaaatgctaatttgccgtgttctaattcagctattccattttcaaggcacaatgaaacacaattaactgaggatggaaggaaattatagaatcttttatttatggatactattatttcgggcttggttaatagtagatcttgaaaagatagtgtattggttctcttgtgggcaaggtaatctaagctttttttatgaaatataattggtaaaattagcattgcattgcttatttcaatatttgatgctattgataacacctcttgcaaagagaatatacccaaaagctcattgttatatattttcatttatagactgactcccagttttgaagccatcctattttgggcttatctgaaaggagcaagaacgttcctgtagtcatagatttaggtaattgatttttatccaacacaatattacagtttcctgtcaattcagtatagacagagaaggctttattaagatgatcttcatttatttctgtaaaacggcttcgtatatacgttgctgaatgacgtgattgccattcatcaagcgcttttagatatattagtctttcttcttgagttgttaaatctccagagctttgcaatttttgaatgaaagcttctgttttggccatttcatttatatattttacgattgaatcgctattcaaatccaaatctttgagttgtttgtaagatatctttgattcaacgttagttgggtatgcagattcaaaatcgtagtattggtcgaaattatttatacaatttcttgaaatttgaataatcctatctattcccaaattatttcgaaaatcatcataacttatatttattttggtgtgatttttaaccaaatcatatttgtgtttaaaaaaagcacctgaaatataattaaaagcatcatctattttatcatcagggattgctaatgtttttagtaatgtttttatttggcggatgatcccatcttcgctatgttgaaaacttatactattaaataaacgtttagaagaattgctatcgagtgagtttatgatagaaatatacttatagaggtcatctgacttatttttatgatcttgttctatcttttctatttcatcttttattttttcaatgtccttagtgtcgttagtcaaaagttgcacgataccaggctctaaggtaagacctttgttagtgtaaaaaataaggctaatgcttttgtcgcctatggtcttaatcgcctctgaccaattatataatgtttttcataagtctatgtctttattagttatattagacttgttaattgaatgtttaacttgaaccaaagttttatgaccctcgatgctctcaagatggagatcgtcataaacttcaatcccaatgtgttcttctggtttaagctctaaggcatgttttaaagcaacgtaatcttgataggtaaaacctattgaatttttgtcagcattagttttttcaaagaaatccatatggtagcccactaaggaaacaagcaatgaaagcataaaaaaacatcagtatctttttttcaccatatcaaacactaaaaacatatggaagcatacgtatcaaagtttagttatataaccttatgtttttatactggttttatgtacatgtgcgctttcaatccgatgagaatgttttagctaaggggcattcgtcagcatatgggctttccaggctatccctatccttcttgctaatcccctgtatcagtcaagcagcgatagctttagctctttgagtttgaacgtaatcactccaccattgcatcaaactctgtcgctctatcagatattctgcacgattgtatgctgcgataatttcatcttttttttgagtgggcaagcgctgcctcaagaacttcagatctgaacttaccggattcttctgccgctgttcttgcaatagaacgcataccgtgagctacaagctcacctccaaatcccattcggatgatagctgcattggcggtttgttcatgcatatgattaagcggcgctttaatgctggggaaaacccattctctatgcccacttattggtttcattaattcaagaatgcgcaaagcttctttactcaaaggaactttgtgaggttttttcattttcatgaaatcagcaggaatgttccaaatactgttggttgtatcaatatcagaccaccttgcgcgaacggcttcacccggacgaacccatgtcaacaattgccattcaattagcatacgtgtttccaaccggattgacgcattcgtcaaagattccataaaccttggcaattcgcttgggggaagggcaggcatattttgctttttgggtttactgaatctttggccaaggttgtcagccgggttgaactcaataagttcttcagtggctgcccaacggaagatttcattcagacgggaaatgatgcggcgtagagtttccaatacgcctcgatgctcaataggatcaaggtgttgttttaagagcttaggtcggatctcattgatagggatattacccagaccaggaaagacatttctctctaagctgcgccagatgtctgctgcatggtcttgtgagatacctgaggtctttaccttctcatctaaccatttccgcgctacggcttggagagtgtgctcagtagcactctttaatgccttcgccttattgttgttatggacttggggatcaacaccatttgccagaaaggagagatattcgtctcgtaaggctctggcccttgcaagggtaaggtgaggatatgtcccaaggctcattttggttcttttcttgctcactggtactgcatacctgaaataccaatttttcttgcctccttttgccaaaggagcgattcgtagaatcaaaccatcgccgtcaaataagttgatttctttatcggctggcttagtgcttttgatttcagtgtcagtgagcttcttagcgatttttgccatttgggaccctcgatttttggacccttcttagtgggtcccattcagggtgccataactcgtagttctcagcaattctcactggacgacaatagacgtaaaaaagcccgcagagcttgtgctgtgcgggcttagtagacttcattgtacttcaaacaactaaaaagtggtggagctggggggatttgaacccccgtccgaaattactacgccgtcggcactacatgcttagtccagtcattacattcgccggttagctgcggacggacacgccactaacaaactatcctgattgggtttaacgctttcaccccaggcaaggtgtccacgcgatctcttttgggtttgacctctcttgatccccgtcctaagagcggaggctagggagagagggaatcttcagtttcttaggctgattaagctgctaaagcagcagattcgtattgcgagtcgtttgcaattattttttttgcggttttttacgaggcctccgcacctcggcatgcaccttgggtttcgcgaatcccgtcgaatccagaatcagccccaaagaacttctgtagtataccagaactataacctgttaagccagagacttaacgattagagtgtttcataattctggctttatcaacctgccattcgcgatctttaatatcatcacgcttgtcatggtctttcttgccttttgcgacgccgattttaactttaacccaggcatttttccaatagacggaaagagccactacggtaaaaccgtcgcgattaactttgccgaccagtgagtcaagctcacgtttattcagcagtagtttacgggtacgcataggttcgcaaacaacgtgtgtagacgcgacgtttagtggggtaatggtggccccaaacaggaaggcctcaccgtttctaaacgtgacgtagctatcgctgatgttggctttaccagcgcgcagagattttacttcccaaccttgcagcgataggccagcttcgaattcttgttcgatgaagtattcgtggcgggcgcgcttattttgcgcaatggttgcggaaccgggtttgtatgcttttttctttgtcatagtgttgatcattatactgtatgcgttgacgaatgaaatcctttcccgtgcgctgcggccttattttgtcgattttattaccgtttatgcgccgttgattttttgtcagttgccagataaatggtattatccgtgcgttttatgtctctcaggaaatgttatgccacagattagtcgctctgcattagtgccattcagtgcagaacaaatgtaccaactggttaatgatgtttgctcttacccagagttcttgcctggctgcacggggagccgggtgcttgacgcttgcgataatgaaatgacggcggcggtagatgttgccaaagcgggtatcagcaagacgtttaccacgcgtaatacgctaacggataaccaaagtatcaacatgcagttggttgacggacctttccgtaagctgatgggcggttggcatttcacgccattaagccctgatgcctgtaaagtggagctgcatctggattttgaatttactaacaagctgattgaattggcttttggcaaagtgtttaaagagctagcggggaatatggtgcaagcattcacccagcgtgcaaaagaggtctacagtgcctgatctttacgttgaggtcgtttatgccttgccagagcgtcagtatgttcggaaggtgagcctcgcggaaggcagcacggttgagcaagcgattgaggcctcggggcttttagcgttgcgtactgatattgatctgcaaaaaaacaaagtggggatttacagtcgccccgtaaaattgggtgacagagttaatgatggcgatagagtcgaaatttatcgtccgttaattgctgatcccaaagagttacgtcgaatccgcgctgaaaaagcaaaaaaataaggcgcgttgtgcgcctcactttttatcagccctgaagcatgacggataaagccagtctgattgaagatcagcgccaatggcatttatccgttagcgctatatcgaaggtgattctctatcttccttctctaccactagcatgatcgacgaaaaaattaatttccgctcagcgctggttcatttttaatatcagtcagaacaccgctgctgttgaacgtcagggtcagcgtctgctgtgtagccttttcgtgtcccggctgctggcggaatacgtagaaccaggtttgagttccaaacgggtcctgcagcatcggagtacctagtgtgtatgccacctgttgctgcgtcatacctttatgaattttggatacatcgttaggtgacaggtagttaccctgattaatatcaggccgatagaccaccttttccagcgtggaacaacccgcggtaagcatcattagcattacagcggcggcagtcagcattttacagcgcatagtaatcacattcctttagggcataggatgacgatgataatagaccttgcagcagttggaaacctttacaaggcttcaatatgacctcctgaatgcaaaaaagttgagcttttttatgcagcaagcagctctttcgcgtttgccagggtatttttcgtcacttcgctaccgcctaacaggcgcgctaattcttgcaaacgggcttttttatccagcttatgcatctgtgtttcggtttctgcgccatccgtttgtttactgacaaagaagtgttgatggccacaacctgcaacctgcggaagatgggtcacacacatgacctgagtggattcccccaactgacgcaacagttgaccgacaatcgccgccgttggcccgctgataccgacatctacttcatcgaaaatgagtgctggcgtatccattttgcgagcagtaataacctgaatagctaatgcgatacgcgataactcgccaccggaggcaactttagccaaaggttgcaaaggttgccctggatttgtggtcacactaaattctatacggcttgccccttctgcgctgaggtgttccggctcgaaatgcacaccaatggcaaatcggccatgcggcatagagagctggtgcatgctttcggtaatcaaggtggccagctcttctgcataatgctgacgagcctgatgtagctgatttgccaatgccaatgcgcgctgatagtgaagattgaccgtttcgcttaactgttcctgatcgctttcctgttgcgaaaggagttgttgttcatccagtagctgttgatgaagctgaggaagttcttccggcgcaatgtggtgcttccgagccagattaagctggcgtgatagtcgctgttccagttcatataggcgattcggatccatatccaacttttcaccataatggcgcaattcatcgctagcttcgctaatctggatcgatgcttcttccagcatattcaataaattgttgaactgctcatccatgcctgccagttcggtaatatgctgtttggcggtataaagctggctgagaatattttgttgttcatcatcagaaagcaactgtagagcctgctggctgatagaaatcaactgaccgctgttagccagacgcttgtattcggcatcgatctgctcatattcgccctgcaccggtgcgaaggcattcagctctttaagatgatattgcagcagttgatgacgagcatcacgctcaagggattgcttctgatgcaaggccagcgaacggcagctctgatgccacagttggtaggcggttttcatttcagctagcaatgccggttgatcggcataggcatccagtagctgtttctggtgatctgatttcaataacagctggtgagcatgttggccatgaatttgaatcaggagttgccccagctctcttagttgagaaagaggaaccgcagtgccgttgataaagccccgcgaacggccatcgaccccaatagcgcgacgcagcagacattcattgctgtcatccaactggtgatgttcaagccatgcgcgagcagttggggtgtctgctaatgagaaacgagcgcagatgtcggctctggaagcgcctagacgcaccatgctgccatctgcacggctacccaagcataatcctaatgcatcaatagcaatagatttgcctgcgccggtttcgccagtaattgcggttaatccgggctgaaaatcaatttctaactcgcgcacaatagcaaaattactgatggtcagttgggccagcatggtaaatctcctgtacataaacacatgtctgtatttgaatacagtataaactggttttatatacagtaaagtggcaaaataactttttagaataatttttttgaccaacccaacttggtgcttaaggtattgaaatagctgtagtcctttggatgaatcaaattcaggtggaaatcgctgcgtcgaaccaggacttcttcaccttcctgaatgggtagggcgatctggctgtcacagctcacttccagatcgctgctaatcttggagaatttcaatcgaatggtgctgctgctgttgataaccaagggtcgcgcggaaagcgtgtgtggaaacatgggcactaaaactatggcgtccagcgtcggcgtcaatatcgggccgccggcggagagtgagtaagccgtagaacccgtcggagtggcaataatcaggccgtcggatcgttgggaaaacgcaaaacgatcgtcgatatacacttcgaattcgatcatatgcgcgacttttccggggtgtagtaccacctcgttgatcgcggtgctcattctgcattgttgattggctcgccgaacctgagtttccagcaaaaatcgctgttcgctgagatattcgccttccagaacgtcagaaagttgctgttgcgcgttatccgggtctagatcagttaaaaatcccagatttcctctgttgacgccaatcactttgatatcatatcgagctaagacgcgcgctgcgcccaacatgttgccatcgccgccgaccaccaccgccagatcggctttttgaccaatttcagccagactgccggtaacggcgttggttaaattgaggtcgcgggcaatttgccgttcaaccataacggcataacccttggattttagccaatggtagagcatttcgtgtgtagcaagagcggccgggtgacgtgggtgaccgacaataccaatacagttgaatcttttattcattgccgtggttttcctcagtagagcctgtttgtgccctacattgtgaccggttcccttgaatccccggttttgatccccataataagccaagtagcgagattaatgctaaaacgcggagatatccatgagtagtaaagaacagaaaacgcctaacgagcaagtctcggaagaaatggaacaagcagtcgagcagcaagcgggagccgcacaagagactagtgacggtgttgatccgcgggttgcagagctggaaacccaattggctgacgccttgcagcgtgagcgcgaaagcctgttacgcgcgaaagctgaagttgagaatatccgtcgccgtaccgaattggatattgaaaaagcgcataaatttgcgttagagaaattttcatcatccttactcccggtgattgataatctggaacgtgctctggaatcagcagatcgctccaataccgaattgacatcaatgatcgaaggtatcgaattgacgctgaaatccttactggatgcagtgggcaaatacggtatcgaagttgtgggtgaaaccaatgtgcctttcaacccggaagttcatcaggcgatgactatgcttgagtctgccgatcatgagccgaaccaagtgatgatggtgatgcaaaagggttatacgctgaatggccgtctgttgcgcccggcgatggttgcggtttccaaagcgaaagcttaaggctacccaatcaagcaaaaggcaccttaacggtgccttttttacgagttcaatcaggtagttggaaatttaggttgccagtcgataggcgctaaattctgttttatcaatagttgattggcctgtgagaagtgtttacagccaaaaaagccgcgatgggcggagagtggggaaggatgcggggctttcaaaatatgatggcgctgcgggtcgataatttgcccttttttctgcgcgtgagccccccaaagtaaaaatacaattccttcccgatgctggtttaatgcggcaatcacccgatctgtaaaagtttcccagccaaaattggcgtgtgaatgcgctttgccaccttcgacggtgagaacggtgtttagcagcaatacgccctgttccgcccagctttgtaaaaaaccgtgattggggcgttcaaagccgggaatatcggtagccagctctttatacatatttaccagcgacggtggcgccggtacgccgggcagcaccgagaaggacaaaccatgggcctgatttgggccgtggtacggatcctggccgagaatcacgacttttacctgatccagttcggttaaccgaaaggcattaaatacgtctttttgcggtggatagacgattttccccgcgtgacgttcggcggcgacctgagccagcgtattttggaagtagggttgttgcttttcctgaccaattacgtcgtgccaagtgagggaggtggtcatgagactctcctttgtttttgctgaaaatttatgttgctcagcttaccggttagcgttgagcagggaaactgttaaaagtttacggtgtagatgtcgcttaaaatagcgccaattaatgtaatttttgttgaaaatttacaaaaataattgttgcgttggtatttgataaaattgatataaaacataaatttgcccacagctcgtaaagtgctgggctgtaaatcttgatttaagtcaaagaataacggtgatttgactggtatataaaacaataagagaacaatggttttaccaaataaccaacgtcacttttccattcctggaattttagccgtattacggaggcaccaaatgattactggtattcaaattactaaagctaacaatgaagccttgctgaactctttttggctgttagacgacgagaaaaacgaactgcgctgcgtatgcgctaaagctgactatgcagaagatcaaatcgttcctgctagcgaattaggtcagattgaataccgcgaagttccgctggaagttcagcctaccgttcgtgtagaaggcggtcagcacctgaatgttaacgttctgcgccgtgaaactctggaagatgctgttaaacatccagaaaaatacccgcagctgaccattcgtgtttctggctatgcggtacgtttcaacgcactgactccagagcagcaacgcgatgttattactcgtactttcactgaaagcctgtaatttatagggttttagccgtgagagtttaatgaaaagggagctttggctcccttttttattgtgcgccgtcttttctaaggtaaagcctgagcggcttcacacttttcggtattcaataagtcattcttatcttttctcataaagaactcatccgacctgccgatagccaagttacacccgttaggtgttcgcttaattttgctgtcgacaaggagtcgtaatgactatgccactgagtctttccgtagcttcgccgttaaatactctgtctaatccaattattccatcgaattcggtcagaacggcgagcacttcaactgaaactgagtcaactttttctgccgttgtgacagccaaaaatgcggtgttttctgctgcaacacgggaaagtaacgatctctatcaatcaatggtttccgatcttggtttatcccggagcgagcagtctgcggcgctaaaatcagctgaagtgataggaaagggtaaagcatctcagaaaagcgattactcgctggcgctgttggctaaagatgtttataggccaaccggggctaatctggacggattccagcgtttaagtgatgctgatctgcttaaagcgggtatcgatcctgctagtttgtctgaccgcgcctctggttttcaggctggaatctattcgaatcagcagcagtatgttctggcttttgccggcaccaatgatatgcgagattggctgagcaacgttcgacaggccactggctatgacgatgttcaatataatcaggctgttgccttaggtaaaaccgcgaaaatggcctttggcgaagccttggtgattaccggtcactcgctgggcggtggattggcggcaacggcggcattagcgacggcgaccgttgcggtaacctttaacgcggctggcgtatcggatcacacgctaaatcgtttagggatcaatccggctcaggcaaaaagtgaagctgaaagtggagctattcgccgttatagcgaacaatatgacatgctcactgacacgcaggaatcgacgtctataattccgaatgccattggccataaaatcacgctggcgaataacgacaagctaagtggtctggacgattggttgccgcataaacatctttcacgcagtctggctgctcatagaattgataaagttctgtcttccatgagcgagcaaaaaccctgggagttgaaaaatgcctgatagaacaccgatgaacagttgcctgcggtatattcgctacactgtttgcggtgtattgatatcgcttatgagttttgagggattggcgatgactgagagtaaaaatgtatttaacgatccacaagtaacgccgattgccgaagctatttatcgtggtgatgtcgcgcagatacagcagctcgcttctgaaaaaatcttgcagcagcggggggatcaatcgatcactttgctgcaatgggcgatcttgaatcagcagccggaaagcctggctgcgttactggaacttcatgccgatccgttccagcccggcttgcaaggcaacagtgccttacatactgcggcgagcgttaaggatgctcattatttacaaatattgttagatggtcggttgaaaccgaatgcgcgcaatagtattacgtcggcaactccgttggctgcggcggtgatggctgggcgagaagtgcaggtgatgatgttattggctgcgggtgccgatcctaacctgccggatcgcctgggagacacaccgctgcatttggctggtaaaatcaatgcgccagaattggcgctacgtttgttacaggccggcgcgaatgctgagttgcgtaataagcagggggctcattttcagcagtattttgcaatgacgccgcaaaaactacaaaccaatgaaatgcagaggaaataccagcagttgaatgaatggctacgggcaaataaacaggctgaattataccagaaacagccttgagactgcgccgcagcgatagagcaacggccgtgtgttaagtgcctgttttgtagataaacagtgtggatttaatttgctcgattttggacggaaattggggatcttgatgaaattatccttcagcaagacaaaatccgtggatgagtttacccataaaaaaagccgctttaacaagcggctttttgctgtccagtggaataaacctgcgcgttaagcgtcagctttattctttggtttacggcgcttaccgacatttttagcatcgcggtggcgcactttaaccttggttttttctttgttggccgccttcagctctttacgcttcgctaaaacctttttcgacggtttgccggtagatttggcgcttggctctttactggttggacgcaactcgtcaatgacccgaggtttcagtggttctttcagataacgaccaattctgcccagcaataaatgatcatgtgcttcaaccaaagaaatcgccacgcctttgcgaccagcccgaccggtacggccaatgcggtgcagatagacgtccgctgtgagcggtaggtcaaagttaaatacatgactgatatcgtcgatatccaggccacgagacgccacgtccgttgctaccaatacgttgacgcgaccatcgcttaaacgaataaccgcttcggtacgcttggcctgaaccatttcaccttcgaggaaccaggcgttaataccggcttcacgtagccagctcaccaattggtgcaccttttcacgggtacgcacgaagataatggatttctgcacgtccggctgtttcagtaaatgaaccaacagggcagttttgtgttcgatattgtctgcgcgatagtaccattgctggatttttttacgctcgcggcgagacggatcggcttccaactctactggctcttcgagaatacgctcggcaaactcgcgaatcgcttcgccttccagcgtggctgagaacagtaatgtctgcttacgccagcgagtttccgcggcgatagtttcgatatcctgcgcaaagcccatgtccagcatacgatcggcttcatccagaatcagggtttctaccgcacggcagtcaaagttctcttctttgatgtactgcagtaaacggccagtggtcgcaaccacgatgtcctggttctcgctgaagacttcagcatggttcatgtaggccacgccaccggtgatggtcgcgatgtctaactgagtgtgtttggccagttctcgggcctgatcggcaacttgcatcgccagctcacgggttggcgtcagaatcaggatgcgcggtggcccggattttttgcgtggaaaatccagcagatgctgcaaggctggcagcaaaaaggcggcagttttgcccgtacctgtgggagccgaacccaatacgtcgcgtccgtccatagctggcggaatagccgcagcctgaatggcggtagggcgctcatagcctttgtcgcgcagggcgtcaatgaggcgttcgtcgagatcgagttcggaaaaattggttacagtcatggtcttcctctacttggggcgccgattatagacgggttagccgaattcttcacctgtttaagcgggaatgatgtcttttaccttcaatcatattgtcctatgctacgccagttaaagattctggtgattaatgtgagcgaacaattgaaaataaaaccgagtttacgtcgcggtggttttacctttaaacagttttttgtggctcacgatcgctgcgccatgaaggtaggcactgacggagtattactcggcgcatgggtaccgttacaacaggctcggcgcgtgctggatatcggctgtggtagtgggttgattgctttgatgatcgctcagagatcgtcttcggaagttttgatcgacggcgtcgaactggaaagcgaggcggcggagcaggctactgaaaacgcgcaggcttctccttggcacgatcgaattcgtatttatagtgccgatgtaaatgcattcgcagaacaccatcctcatcaatatgatctaatcgtcagtaatccgccttacttttctccggcggtggcctgccgtgatgaagcgagaaatactgcgcgttataccggatccctgactcacgaagcgttgttgcgtagcgctgaacgattgatcacgccggaaggtcgcttctgcgtagtattaccgcacagcattggtgaggatttggcagcgtcggccgttcagcaaggttggtttgtgcggcaacaggttgatgtgcgagacagacccggtaagccattgcaccgaatgttgctggttttatctcgtcaggatggagaaaagctacatcagcatttaactttgcgtcaggcggaggatgtgtattcacctgaattttgtcagttaattggtgatttttatcttaactattagttgtgaaatattcattgtgacaaatagataaagaaactaagggcactgaagtgcccttaacagaataccgaaatatcagggttgaaggatggtcgggcgcggattttccagtagatctggataatcgagcgtataatgcaggccgcgactttctttcctttccatcgcacagcgcacgataagttcggcgacttgcaccagattacgcaattccaacaggttgttggaaatacggaaattcgcgtaatattcgtcgatttcctgctgcaaagtattgatgcggcgcagggcgcgttccaaccttttggtcgtacgtacgatgccgacgtaatcccacataaatagccttaattcatgccaattatgttgtattactacgcgttcatcggagttatcaactcggctttcatcccactcaggcagatgtttggctaatttggcgtggggtaaacgcatcaaaatatcctcagatgccgaccagccgtaaaccagacattccaacaatgagttagacgccatgcggttcgctccatgcagcccggtgtaactcacttccccaatggcgtacagcccgtccaaatcggttcgaccatgctgatcgaccatcacgccgccgcaggtataatgcgctgccggaacgatgggaatagcttccttggtcaggtcgatgcccaaagacagcagtttttggtagatcatggggaaatgctgcatcacgaattcagttggtttatggctgatatccagatacatacaatcggcacccagccgcttcatttcatggtcaatggctcgggcgacgatatctcgcggtgccagttcgcctcgcgcgtcaaaatcaggcataaagcgggtgccgtcagggcgttttaggtaggctccttcaccgcgcagcgcttcggttaacaggaagttgcgcgcctgtgggtggaacaggcaggtcgggtgaaactggttaaattccagattggcgacgcggcaaccggcacgccaggccatagcgataccatcaccggaggaaatatctggattggtcgtatattgataaaccttagctgcgccgccggtagccaacaccacggctttagcgcgataagtttccactttttccagctcgcggttccagacataagcacccacgacccgcttggttcccggcaggccaattttattcgatgtgatcaagtccacggcattgcggcgctctttcactgaaatattggggtgggtgcttgctttacctaccagggtagtctctacttctttacctgtagcatcggctgtatgcagaatgcgtcggtggctgtgaccgccttcacgggttagatgaaaacgttcttcgccgctggcgttggtttcggtatcaaagagtacgccctgatcgataagccattgcacgcagctgcgtgcgttactggcaataaattcgacggcatctttatcgcacagcccggccccggcaatcagcgtgtcatcaacatgtgagctgatactgtcggtttcgtcaaaaacggctgcaattccgccttgagcataaaaggttgcgccttcgttcagcgggcctttgctcagaacggtaactttacagtgtggtgcaaggcgcagcgccagtgacaggcccgcagcgccgcttccgatgatcaatacatcgctaacatgttctgatgatgatgacataacgtatgatgtgtgcagaagaagggtgattttcatggtagcctatctgcccgagcaaaagctacgggtatcagatattgaaaggatatcgaaagaaaaacagggcaatagggaactttgctttttaattaaactccaagcaagtgcttgctcaggaaggtaatgatatgactggcagtacgatttttagcgtggggatatatttcgggagagtttgcctcggatgagcgagcagttaacggatcaaatgctggttgagcgggtccaaaaaggagaccaacaatcgttcaatttactggttattcgttaccagcataaagtggcgagccttgtatctcgatacgtacctcagggcgatgtccctgatgtggtacaagaatcctttataaaggcttatcgcgcattggagtcattccgtggcgatagtgctttctacacatggttgtaccgtatcgccgtcaacacggcaaaaaattacttagtcgctcagggacgtcgtccaccatccagtgatgtggatgcaaatgatgctgaaaattacgaaaatgcgggcgcattaaaagaaatttcgaaccctgagaacttaatgttgtctgaggaattgaggcagatagtttttcgtaccatagagtcactcccggaggatctccggatggcgatcactttgcgtgagttggatggtttgagctatgaagaaatagccgccattatggattgcccggtcggtaccgttcgttcgcgtatcttccgtgctcgcgaagctatcgataacaaagttcagccgctgattcagcgatagcggacacataaagggtatttaggcatgcagaaagaaaagctttccgctctgatggatggtgaaactcttgatagcgaactgatgagttctttatcaaaagataacgaactgcaacaaagctggcagagttatcacttaatccgtgacactctgcgcggtgacgttggtgaagtcattcatcttgatattgctagccgcgtggctgctgcactgaaagatgaacccgtccgcttcgcaccagctgccgtgcctgaatctcaacctcagccgcatctctggcagaaaatgccgttctggaacaaagtgcgtccctgggctagtcaacttacccaagttggcatggctgcctgcgtttctctggcggtgattgtgggggttcagcaatacaaccagccagcaacagacactatgcagtctgaatctccggcctttaataccttgccaatgatgggcaaagcatcgccagtcagttttggtgtgccggttgatggaacttttggcaacagtcagcaaaagcaggttcaggaacagcgtcgccgtgtcgatatgctgagccaggattttgaattgcagcgccgtttaccgcaggatccgctacaacaagaacagtctgtatcgccgcaagccgctattcaggtgcctggaactcagtccttaggaatgcaacagcagtaatgaagcaacttttgttatccgtctgtttactgacgggcggcctgttcgtgccaataatcgcctctgctcaaaatgaaccagaggcgttgttgcaagaaatgggcagtgccagtcagtcactcaactatgagctaggctatattaatgtcaataaccaagggattgattctcttcgttatcgccatgctatatctgaaggcaaagcgttagctcagctattacgcatggatggacctcgcaccgaggttcttcagcgcggtactgaaattagctatttcgaacctggcttcgacccttttactctggccggtgatcacatagtcgatgctttgccttccatcgtgttttctaatttcaaaaatctggccaaatattacgactatattgccgtggggcgagcgcgcgtagccgatcgtccctgccaggttattcgtgttgtagccaaagatggcacgcgctatagctatattatctggctagacgaaacgacaaaattaccgatgcgcatcgatctcttggatcgcgatggagaaacgctggagcaattcagagtgatatccatgggggtaggtacgccgattcaaacggtattgcaaggtatgaaagctcttgagctaccaccattgctcgctttacctgcgaaacaaaaagtcgatttcgtctgggctccagcttggctgccttcgggaatggtcgaagtttctcgcagccgtcgaactctaccgaatctggatacgccaacggaaactcgattgtataccgacggattgttcagctttacggtgaacgtaaacccggccgataagaatgctgtgaccgggcaatctttgcgtcaggggcgccgtaccgttgaaagtgaagtacgcaatggcgctgaaattaccgttgtaggtgagattcctcccgctacggcgaaacgtattgccggcagcgttgtgttaaaggctaagaaataatgatgaaggaatgggccacggtgatttcgtggcaacagggtatagcgttgctgcgctgtgagcctcatgccggctgcggtaattgtcatgcccgcggcggctgtggcagcgacctgttgaataaacttggcccagaatctcaacatcagcttcaagtcgctatcgatcaaccgcttgaaccgggtcaacgggttgaagtgggaatcagcgaaggcagcttgctacgttcggcgatgttggtttacctgacgccgcttttcgggctgattgccggtggcgcattatgtcagaatatctttgtgaccgaggcaatgaccgcggttggtgcggtattaggcggaatagccggttttttacttgctcgaaggctggcggctaaggttgaggagcgggctgattatcaaccggttgtattgcaaataggtttaccgccgacggcgctgagaatccagcaagattgatttcaaattagtgatttatcgggctgtgataggctggtatgcggttttgaatcatatgttgaattaaggcaataaacagatctgcgctgattaattccgcataatttatcgaaaataaaacactcccttcatcatcaagcaggcgtatcgactcgttattattgcccttactcccagtttcaattctccgtatattctcgatatcaatgacgcgttgctgcgtggttaaagtgcgtgcgttcagcctaatggcatggggaataacctcaaccaggtcatgatcaataaattgattaaaccaagacggttttttgttaaccacatcaaagttgattatttctccctgaaatagtcgggtaagacaggcgtcgccagcatggctaacctgttgataaacgatatttcgcatcaaggggttagctcccatgatattagaaacgataatattccattgctggtggtgtgaggcgcgaaatgccattgcgtttatctttccccttggattaatccccaagtggaaatggtaaatatgcgtgattttatcaaaaggaatgaaataaactttttcactgtaatgattaaatacccgaacgccattctcatataagaaataggtaaagtccggcgtgatatataaccgggaataaagcaggacgctcagggataatgccgccagcagaatgcacaacaccaataatattgaaggcgtagaaaatacattggttgccgttgccaatgtgataatcaccagtgtcattactataataaaggcgacggaagccagtgtcagttttgagtttttcttactaaactcgtggcggctgagaattgggccttcatcgatcatcagacctccttaatggcgataaaacggtttcaccatttaggttattccaaggtgatttttatattctaggtgaggcgaatattgacgatatgaggtttttcctaaagtgaatgggtatttctgaaaagacatcagttacctcaatgagaaaataataagtgacttaggaggagagccaagaagagaatgacgtaggtttctttgagcatatctcccaaatccgcccaataaccactttatttaaatggatttaaactctgatataaatcagcaacataaaaatacggcgcgttaagctttaatgcgactatcctttaagccgagcgactcgcggttccggtattcatattaatgccaatgatgggccgctattgctctcgaggagtgtcctgacagagcgacttgatttcatctgaaagcaaggataatagtaaggattggcatgaggatgactaggttttcattgtcttgacatgtagaataccgcgacttaggcgaaagacagccaacctaacaacttacaatactgactgtcgctttatgtccatgcgtgtgtccataggcgaatgattcagaaataccaaggcagaaaaacttttataatgaagcatatacgaaatttctccattattgcccatattgaccacggtaagtcgacgctgtctgaccgtattatccagatttgtggcggtttaagtgagcgcgaaatggccgcgcaggttctggattccatggatctggagcgtgagcgcgggattaccatcaaggcacaaagcgtgaccttggattatcgtgctcaggacggtcaaacttatcagctcaactttatcgatactcccggtcacgtagacttctcttatgaggtttcccgctcgctggcggcctgtgaaggcgcactgctggtggtggatgctgggcagggcgttgaagcccagacattagccaactgctataccgcgatggaaatggatctggaagtggttccggttttgaacaaaatcgacctgccagccgccgatcctgaacgcgtagcggaagagattgaagatatcgtcggtatcgatgctgctgacgccgtgcgctgctcggcgaaaaccggtgttggtgtacctgatgtgcttgagcgtctggtgcgtgatattccgccgccagagggcgatccggaagctccattacaggcgctgatcatcgactcatggttcgataactatctgggcgttgtttctttgatccgtattaaaaacggtaccttgcgcaaaggcgacaagatcaaagtgatgagcactggccagacctataacgctgaccgcttaggtatcttcacgccaaaacgtattgaccgcgaagtgttgaactgtggcgaagtaggctggttggtctgcgcgattaaagacattcttggcgcgccagtcggcgatacgctgacgctggctcgtcaaccggcggaaaaatccctgccgggctttaagaaagtgaaaccgcaggtttatgccggtttgttcccaatcagctctgatgattacgaaagcttccgtgatgcgctgggtaaattgagcctgaacgacgcgtctctgttctatgaaccagagagttctactgcgctgggttttggtttccgctgtggtttccttggcttgctgcatatggaaatcattcaggaacgtctggaacgtgaatacgatctggaactgattaccactgcgccaaccgtagtgtatgaagtgattaccactagtcaggaaaccgtttatgttgatagtccgtctaagctaccggcactgaacaacattgaagagttgcgcgagcctatcgcagagtgtcatatgctgttgccgcaagagtatctgggtaacgttattacactgtgtatcgagaaacgtggcgtacagaccaacatggtttaccacggtaaccaggtggcgctgacctacgaaatcccgatggcagaagtggtgctggacttctttgaccgcctgaaatcaacgtcacgcggctatgcgtccctggactataatttcaagcgtttccagacctctgacatggtccgcgttgacgttttgatcaacaacgaacgtgttgatgcactggctctgattactcaccgtgacaacgctcaatatcgtggtcgcgatttggtcgagaagatgaaagagctgattccgcgccagcaattcgatattgcaattcaggcggctatcggcaaccacatcattgcgcgttcaaccgtgaaacagctgcgtaaaaacgtattggcgaagtgttacggcggtgatgttagccgtaagaaaaagctgttgcagaagcagaaagacggtaaaaaacgtatgaagcaggtgggtaacgttgagttgccacaagaggctttcctggccattctgcacgttggcaaagacggaaaataagttgtaaggagtttgaatggctaacatgttcgccttgattctggccgtagctacgctggtcacagggattatctggtgtttcgagcgtttcaaatgggcgccggcacgtcaggcaaaaattgcggctatcaatgcccaaacagcgggcacggtagatgagaaagctttatctaaagttgctcgtcagcctggctggatcgagacctgtgcttcgattttcccggtgctggcgctggtgtttatcgtgcgttcattcatttatgagccatttcagattccgtctggatcgatgatgccaactatgctgatcggcgattttattctggtggaaaagtatgcctacggcattaaagatcctattacccagacgacgctgatcccaacgggacatccgaaacgcggcgacgtggtggtatttaagtatccgctggatcctcgggttgattacatcaagcgtgtggttggtttgccgggagatcgggttagttacgatcctattgccaaacaagtaacggtgcagccagcctgcaatactggtcactcttgtgatagcgcgttagccattacttacagcgaatctgtgccgagcgaattcgtccagactttccgcttcagcggtatgggcgagtcttcggccggattcttccagattccgaccaataagccggttccagatgatggtgtacgtttgcgtcagcgcagcgaaagtttagggccggtttcccatcagattctgatggtgccgggtcggaacgatcagattggtgcttattatcagcagccagaccagccgcttggcgtttgggtggttccggaaggtcactactttatgatgggtgataaccgggataatagtgcggatagtcgcttctggggcttcgtccctgagcgcaatctggtgggtaaagccactgctatctggatgagttttgaaaagcaggaaggtgaatggccaacgggtgtgcgtttaagccgtattggtggaattcattaatctgagcggtatcctgattgactggcgctgttggctggcaataatccgataaatcccgataagctgatcgacatcagcaatttgggcggtgaatgccccaacaacgccagaatttcaattaataagggtatatataaacgcagcattatgtttccacacgttgtagaataacctttcgagcgataaaagttggcttcctgttggaggcactgcaaacgaaacagctttgtgttggcttgggcgaagcagacctgttccgtatgctgtagtttttgacgcattcttgatctattggtaactcatgaatcccatcgtaataaccaggctacagcggaagctgggctatacttttcaacagcaggatctcttgctgcaagctctgactcatcgcagcgccagcagcaaacacaatgagcgtttagagttcctgggtgactcaattctgagttttgttatcgccaatgagttgtatcaccgcttccctcgcgtagacgagggcgacatgagtcggatgcgggcaaccttggttcgaggcaatactctcgccgaaatggcccgtgaatttgaccttggcgaatgtttacgccttggcccgggtgaattgaagagcggcggttttcgtcgtgaatccattttggcagatacggtagaagcccttatcggcggtgtgttcctcgatagcggtattcaaacggtcgaacggctgattttggactggtatcgtagccggttagatgaaatcagccccggtgacaagcagaaagacccaaaaacgcgtttgcaggaatacctgcagggtcgccatctgccgttaccttcttacctggttgtgcaggttcgcggagaagcacacgatcaggaatttactatccactgccaggtcagtggcttgagcgagccggtagtcggtactgggtcaagtcgtcgtaaagctgagcaggcagcagcggaacaagcgctgaaacagttggagcttgaatgagcgaagtagaaaaaacgtattgtggttttattgcaattgttggtcgtccgaacgtgggcaaatcaaccttgctaaacgagttgttgggtcaaaagatttccatcacctcgcgtaagccgcagacaacccgccaccggattatgggcatccatactgaagggccttatcaggctatctatgtggataccccggggctgcatattgaagaaaaacgtgccatcaaccgtttgatgaaccgagcggctagcagctcgattggtgacgtggaattggttatttttgttgtcgaaggaactaactggaccgccgacgatgaaatggtcgtgaataaactgcgcagcttgaaatgcccggttctgttggctatcaacaaagtggataacgtcacggataaaaccaagctgttgccacatattcagttcctgagccagcagatgaatttccttgatgtggtgccaatctctgcggagaaaggcatgaacgtggacaccatcgcggccatcgtgcgtaagcatatgccggaagctgaacatcatttcccggaagaatacatcaccgaccgttcccagcgctttatggcgtcggaaattattcgtgaaaaattgatgcgcttcctgggtgaagaactgccttactcggttaccgtagaaatcgagcagtttgtgccgaatgaacgtggtggttacaacatccacggtctgattctggttgaacgtgaaggccagaaaaaaatggttatcggtaacaaaggtgccaagattaagactattggtatcgaagcccgtcaggacatggaacaaatgtttgatgccaaagtgcatcttgaactgtgggtgaaagtgaaatcaggctgggccgatgacgaacgtgcattgcgcagcttaggctataccgacgatctgaaataagactcgtcgatggaaggttggcagcgcgcatttgttttgcatagtcgcccttacagcgaaaccagcctgatgctggatttgtttaccgaaggggaagggcgcatgcgagttttggccaagggtgcgcgtggccgacgttccaatttaaaaggctgtttacagccttttacgccattactggttcgctgggccggtcgtggggaagtgaaaacactacgtaatgcggagccggtttctctggcgctgccactcagcggatcgatgctttacagcgggctgtacgttaacgaactactgtctcgcgtactggagcacggtactaactattctgcattattcttcgattatctccattgcttacaagcccttgccgcaacggacggttcccctgaacacgctttacgtcagttcgagctggctatgctatccagtctgggttacggcgtggattttctccattgcgccgggagtgggcaagccgtcgctgacaccatgacttatcgctatcgggaagagaaaggttttatcgccagtttggtggtggaccactacagttttaccggacggcagctacaggcattggccagtcgggagtttcccgatgctgatacattacgtgccgccaagcgttttactcgaatggcgttgaaaccttatttgggcggtaaaccgcttaaaagtcgtgaattattcagacaatttgtaataaaacctcctgccgacccgacgcagacatcctgattttattgatttttaatccgttctgtatcaactttccccgatcctaacctatccgctgcgcctgcactcggtgtaaactgcgggctgttaacctatcttactacgggcttttctggagggctgtcatggctgatttgctgctaggcgttaatatcgatcatatcgctacgttacgaaatgcgcgtggtactcactatcccgatccggttcaggcggctttcattgccgaacagtctggtgctgacggtattaccgttcatttacgcgaagatcgccgtcatattaccgatagagacgtacggattttgcgtcagaccattcagactcgaatgaacctggaaatggccgtcacggacgagatgctggacatcgcctgcgacattcagccgcacttttgctgtctggtgccggaaaaacgtcaggaagtgaccaccgaaggcgggttagacgttgccggtcagatcgacaaaatgacgttggctgttggtcagcttaccgacgcggggattctggtttcgctgtttattgatgccgatatgcgccagattgacgccgcggtggcggtaggtgcaccttacattgagattcataccggcgcttatgctgatgctaaatccgatctgattcgtcaggcggagctgatgcgtattgccaaagcggcggcctatgccgctggcaaaggtctgaaagtgaatgccggacacggcctgacttatcataacgttcagcctattgctgccttacctgaaatgcatgaactgaatatcggtcacgcgattatcggccaggcggtgatgaccggcttgccggctgcggtttccgaaatgaaaaccttaatgcgggaagcgcgtcgctgatggctattttggggctgggtactgatattgttgaaatctcacgtatggaagctgtggtgaatcgcagtggagagcggctggcaaagcgagttctcagcccggcagaatggcaacagtatcagcaacatcagcagccggtgcggtttctggctaagcgttttgcggtgaaagaagcggcagctaaggcgtttggcaccggtattcgcaacggactggcattcaatcagtttgaagtcgtcaatgacgttttaggcaagccgacgctgcacttacatggccgcgctgcggagctggcgctggagctgggcgtggcatctctgcatgtttctttagcggatgaacggcgctatgcctgtgcaacggtgataattgagagttaatcaggatttaatcgattcggatcttggcaagggcgtatttatacgccctttgttgcaactgcggcgcggttacaggcggtcggcgtgatgcagcagaacgtatttatcccatagctgctcgttagtttcgacgcaggccggatcggtaataatagtgttatcaatcgggcaaaccaattggcaggtaggcgtttcgtagtggccgacgcactctgtacagcgcattggatcaatttgataaatttcttcgcccatcgtaatagcctgattcgggcactccggttcgcacatatcgcaattaatgcatttacgcgtgatcaacagggccatgagttcgctacctttggtgtgggggacataaatcagccggcgattataccgctatcatcgccttagaccagttttttcaccagatttgcgctgtggttgatgtggtcttgcgcctgatcaaaatcttgctggatgattgccataaagagcaaatcggtgagagcaaactgagcggtgctggaggagattgccgcgctgcgaatggccggttcttccgcaatggtatacaaacaatgatcggcgcgttgctgtaggccattaggggaaaaactggtgagtgccagcaccttggctcccgcagcccgcgcttcctccgccgccagattcacttcccttcgttcgccgctgaaagatatggcaagcagtaaatcctgtggactcatggcctgaaccgtcgctaattgtacgtgcatatccgcttcggctaccgccataatgccgattttcaacaacttataggataaatccttcgccacaagtccagaagcaccgatccccagtaggataactcgacgagcatttttcagcatttccagcgccatgagcaggcgttcttcactgttgatatccagcgtggcgcgtagagcggcctgcttttctgccaatagcttttcacctacggtttttaaaccatcggtactgagaatctgattatgtactttcaccgcggcctgcggtgtggccaccacttcgctcaacgccagttttagcgccggaaagcctttatatcccagtttttgagcaaatttcactacgccagactggctgactccggccatttgcgccaatttctgcgagctgagatgccgcgcctgttcaggattttccagcagaaaatcagccagttttcggtcgttttgcgccaatgtagggtagatctgtcgtatgcgtagaagactgctcataacaccattcctgaaagcgggaagacattctgccatgtttagcgctaaaaaatcagatcgggcgcatggatagggttaacttaccgatttttgtgatctctgctctaaagatagccaaaaacactcgccttgttgaatataatattcaattataaatatattaatgtgaattaaaaattcaatgaggtgacgtatgaacttaggtactttggtatcagaaagccgtaatccggcaacaagggatctggataaattatccaccctggaaatggtggagcgttttaacgatgaagatcgtaaggttcccgatgcgattcgtttagtgttacctgaaattgcgcaggcggttgatttagctgccgaagctttgaaggctggcgggcgtctgatctatctgggagcgggaaccagcggtcgtctgggcgtattagatgcatccgagtgcccacccacttttggcgtgcctcacggattagtgatcggcctgattgccggtgggccgggagccttactgaaggcggtagagggggcggaggacagcctgacattaggtgcggaagatttacaggcattgaagttaacctccacggatatggtggttggcctggccgcttccggtcgcacgccctatgtgatcggcgctttgcgctatgctcgcgagttaggttgcccaacggttgcgatttcctgtaaccctgactcacctattgcgcgggaagcgcagctggcaatttcccccgtagtagggccggaagcgttaaccggttcaacgcggttaaaatccggaactgcgcaaaagctggtgctgaatatgctgtctactggcgcgatggtgaaattgggcaaggtgtatcaaaacctgatggtggatgtaaaagccactaacgtgaagctggtggatcgcgcctgccgcatcgtggtggaagccaccggcgcaggaagggaagaagcggaaaatgcgctgaaacagaccgattttgaggttaaaccggcgattttgatgatcctgaaaggcgttggcgcagagcgggctcggcaggatttggcgcagcataatggttatctgcgcgccgctttatagcgctcagcctgaggatatgtggcaatggataaatcaaccgctttagcgcagcaaattttggtcggtattggtggcgaagccaatattcgaaaacttgaaaattgtatgacccgggttcgagttgaggttaaagacgacaatctgctggatttatctcatttgaagcagttaaccggagtcaaaggctatattaagcagggggaacagcatcagtttattgttggccccggcgcggcgtcgaaggtggttgagcgcatgcggggcctgatggttggaaaaacagaagacatcgctgaaaccgatgcgatcggtcgaaataaagcgcaggccaaagctaaatatgcggctccaatgagcggtgcgctgaagaaactggctgacgttttcatcccgctaattcctgcatttattgcttccggcttaattatgggaatagtgaatattctcaagcgtccggatatttctggcgatttagcgctgcattacccgaatattctggggttgttggcgatctttggcagtgcagtgtttgcgattatgaatattctggtgggcgtcaatgccgccagagtgttcggcggttcgcaggcaatgggcggcgtaatggccggtattttatccagcccggcgctggcgcaaattacgctgtttggcgaagcgttgcagcctggtcgcggtggagttattgccgttttactggttgtggcattgatgtgctggatcgagaaatggttgcgtaatcacctgcctgaatcgatagagcttattgtcaatccgttgttaactacgctaattaccgcctctttggctattttgctgctacaaccgctgggcgggtatatttctgaagtgattacccacggagtcaatttggctatcgatcgcggcggactgtgggtcggcgcgctgctgtccgggctgtttctgccgctggtactgtccggtttacatcagggattggtgcctattcacgtagagctggtgcaggctcacggcgccaatccgttactgccgatactggcgatggctggcgtagggcaaattggcgccgcgttggcggtactgatgaaaacgcgcaatgcgcgtctgaaaaaagtgattaaaggggctctgccggtcggcattttaggcattggcgaaccactgatttttggggtgacgttacctttaggtaaaccctttatcggcgcttgcttggggggggcaatcggaggggcgttaatcagctattggaaagtggcgacggtgataaccttcgggatttccggcctaccgctggctttgaccattatttccggcaaagtcatgttgtaccttttggggatggcaatcactattctggccggttttatatttacctggattatggggtttaccgatccagaagaataatagcgtaacgctgttcatggtaaggaaaaaggcggtagtatcactttaggatatcgctctgtcgacgcggatttggcagagcgaaagacattttgaggagtgataagttgatgccagaatcgaccttagcaaacatcgcgccgcaggccgctgaaggcaaacgcgttgtattttttgatttagacgggacgctgcatcagcaagatatgtttggcagctttttgcggtttcttactcgtcgcttacctcttaatttacttctggttattccgttattacccgtcgttgggattggcttactggcaggaggccgctgcgcccgctggccgcttagcctgctgttgtggagcatgaccttcggccgtagcgaatctcatctgaaagatctggagcggcgcttcgtgggggcgtttcgtcagaaagtggtgggttttcctgtagtaaaaatgcgcctgcggcagtatctggaacagcaagatacgcaggtgtggctgatcaccggttcaccgcagcggctggtggagcaggtttaccatgattctctttatctgcccaagttacatcttgttggtagccaaatggcgcgatgcaacggcggctggattttgccgctacgctgtctggggcaggaaaaagtggtacagcttgagcagcggctcggctctcccttgaaactttatagcggttatagcgacagtaggcaggataacccgttgctgtttttctgcgaacaccgctggcgggtgagtaagaacggcgaattacagcggttagagtgattgttttcctggaataaccgcagggtttgccgctgtttttcatgactttaaaggctcggttattgagttacgtcagttgttgcctcaatgtgttacatcggtattactatggcctaaacgccagattttttccgcgtagcgaccgagtaaccataagcttccgcccagaatcacgaaaaacagcgttttggtcagcgaatcccaaaacagttcgaaaaaacgggtgtacagattgatggctaaaaaggttaagccgaagccgcgaagcatggcgtcatctcgcttcaaacccagccatatagcggctcctgccgccagagcaaacagtaggctccaatgaaacagcgcgatctggcgcacctgataccagccgtcaatatcaccgtaattgccgaagatcgacagtaaccataaagcgagaaataggtatagcagccccattgcttgtgaaacccgttccagccgccgctggcgcagcgggttttgggccagcagaacgaccgatatcagtatcaaaccgaaaagaataaagcgcagcgggtagttcaggcccagccaataagctccccagccggaaaggtagcccgtttctgcgccaaaggcgttccccagagataacagagcaaatagccagaccaagggggagcggcctagccagccgattagtgcataaattcccgcaccgagcagcaataatagagaaacgcggccactgccgttatccagccaaatgcctaagtagcctaaagatgttgcggtaaataatacgccgagaaacagcagggcttcattgctgtaaattttatctgggctgaggcgataacggcgaaatccccaataatagaatgtaacggcaatccctgcgcagattacggaaatggccggagcgtcgaagcgcaggaattggctaatccaggcaatgagaacgctgtcggcaaacaggctggcaacggcggtagccaggcaagcgagcgcgcctaaaaaggcatagctcgccagtctgcgccaatcaaaaggctgaatcacaacgtgctttaacaggcgctgatgttcttccggcgcaatgacgccttcactggcccagccatctagggttttctgtaccaccgccgcattttttttgctgagtttcatatccaggttcccttgtatgacaggttctctcggcggtttaagccattgcttcgggtcagcaatgtgaaggtgacggcgagattttctatgtattcttcactttactgtattgatgacttttattgagtataagtaatagatgaatagcccggtagcgatagtctgagtacttcgggcggacaaaatccccgttctgcgcctgcgctgtgtataatgcccgccgcaaaagtgcctgagaggtgaatgtgtctattgaatataatgatgaatactggatgcgtcaggcattagagctggcgcagcgcgcgcaggaagagggcgaagtgccggttggcgcagtgttggtgttagataatcaggttattggcgttggctggaaccgacctatcatccatcatgatcctactgctcacgctgaaatcatggcgttacgccaaggcgggcaggcgctacagaactatcgactgcttaacgcgacattatatgtcacgctggaaccttgcgtgatgtgcgccggagccatggtacacagccgtattcgtcgtctggtttacggtgctgacgatgtgaaaaccggcgcggcaggctcgttggtggacattttgcgtcatccggggatgaatcatcaggtcgaaattacttccggcgttctggctgaggcatgttctgctacgctgagcgcctttttccgccagcgccgggagcagcaaaaagcgctgaagcaggctcgccgcgccgctgcgcaaaacgagccagaatagtccttgaatcggtcagttattaatcgaccagcccggcccaaccaccggataggctttgcctaattcagcttcgatagccgcactttgcgcggcttttttctctttatcctgcaaataacccaccaaactgacctgatagcgccggatgttttccacgtagttataagcctcatgcccacgggcatagccgtaagtcgtactcgggtaatagcgcttctggctcagcatcggcaaacgcatttttacatctacccagctatctggattaccgttctggcttttggtcagtttacgggcatccagcatatgaccataacccatattataagccgccaatgcaaaccaaatccgctcgtcttccggcaccgtttccgggatctttttcatcaaacgttgcagatataccgatccgcctttgatgctttcctcagggtccagacggtcttttacgcccaaaccgtctgcagtggcgcgggttagcatcatcaggcctctgacgccggttggtgaggtcgcctcgggattccagtgtgattcctgataggcgatggccgctagcagcttccagtcgatttcaccggcgtgcttctcaaacagcggctggaaggttggcaataccgtgtctatggctcttaggaaggttttggtatccacataatcgaagctgccaacgtggcccagatatttttcttctaagcgcgccagactgccgtcttcaaccatttggctgtaaaaatccagcagtgcggcatacaggctgtcatcatcgctacgcttaaagtaccaggtgaccggttcttcatcggtaacatcgaaagctaccgctaactgcgggtggatgcgctgcaacagggcaatagtgatggaatcgcctatagtgtaatccagcttgccatcggccacctgctctaagagttctttagccgagcgatcggttgaggactcccagctcaaattcgggtacttgccctgttttagctgttttagcgccgccatgtgcgcagaaccggcggccacggtcagttgcccttgcagatcgttaaaggtttttgggcgggttttgcccaaccgatacaccaactgttgggaaaccgaatagtatgcggggccggtgcgcgcccgattcaggcgttcactgttataaatcaggcctgcggccagcaggtcggcgtcgttgttgtccagatcttcgaacaggtcatcgatattgttacgggtcgtaaccaccagcttcacgccgagataatctgcgaagcgctttgctagttcgtagtcaagaccggtagggccatctttacctggggtgtagatcagcggtgagttcatcgtactgatacgaagctctccgcgggctttgatctggtcgagttgtccctcctgaccgttgcgccaggaaatattcggccatagcgcaagagccagaagcaaggtaacaacaccgataaaaaaataatttaatttaaggcgcgtcaaatagttgtctctcggcagcgcggggttgtgcgttatatataagggcgatttaacatggttaaatccccagtgcgggggcattttgcgcaacaaaacgccagtgtgcaactttattgacactttatgataattcgacgacttctcgcgctattatcaataatagatacgcaaacggtttcgtcggaggccgagattctctataatggcgcgcgttttcccctgttgcgcccaatgaagtgctgttccagctgcttcgaagacgagagaaacttagattatggaaatactgcgtggttcgcccgctttgtcggcttttcgcattaccaaattgctgtcccgttgccaggacgctcacctgccggtgagtgatatctacgccgaatatattcattttgccgacgttagcgcgcctcttcgcgctgatgagcacgccaaactccaacgacttctccagtatggtccttctctccctgaacatgcccctcaagggcgtttgctgctggtcacgccgcggccgggcacgatttctccctggtcttccaaggcgaccgatattgcccataactgcggcttgtctcaggttttacgtctggaacgcggtctggccttctatattgatgcgccagagctgaccgaaacccagtggcagcagttggtcgctttgttgcacgaccgcatgatggaaacggtatttaccgatttgcagcaggcagagcagctgtttgctcatcagcaccctgcgccggttcagcgggtagatattctgggcgaaggccgcgcagcgctgaagcaggctaatatcaagctgggtctggcactggcggaagacgaaattgattacctgctgaatgcctttaccggtttggggcgcaacccgacggatattgagctgtatatgtttgcgcaggcgaactccgagcactgtcgtcataaaatctttaacgctgattgggtgatcgacggcgtggctcagccgaaaacgctgttcaaaatgattaagaacactttcgaacaaaccccggattacgtgctgtctgcttataaagacaacgcggcggtaatggccggttcgcaggttgggcgtttcttccccgcgccggaaaacggtgtttatgattatcatcaggaagatgcgcatatcctgatgaaagttgaaactcataaccacccgacggcgatttctccttggccgggtgccgcaaccggttctggcggcgaaattcgtgatgaaggtgccaccgggcgcggtgctaaaccgaaagccggtctggtcggtttctcggtatctaacctgcgtattcccggttttgaacagccttgggaagaagatttcggtaagccagaccgcattgtgacggcgctggatatcatgaccgagggtccactgggtggcgcggcgttcaacaacgaatttggtcgtccggccctgctggggtatttccgtacctatgaagagcgggtcaatagccataacggcagcgaactgcgcggctaccataagccgatcatgctggcgggcggtatcggtaatattcgtgccgatcacgttcagaaaggcgaaattaccgttggtgccaaactggtggtgctaggtggcccggcgatgaatatcggtttgggcggtggcgcggcatcttccatggcgtccggccagtccgatgcggatttggattttgcctcagtacagcgcgacaacccggaaatggagcgtcgctgtcaggaagtgatcgatcgctgctggcagttgggcgagcagaacccgattctgtttattcatgacgtcggtgccggcggtctttccaacgcgatgccagagctggtgagcgacggcggccgcggtggtcgctttgagctgcgggacattctgaacgatgagccggggatgagcccgctggaagtctggtgtaatgaatctcaggaacgctatgtgatggcggtagcgccagcgcaaatggcgcagtttgatgaaatctgccgacgtgaacgcgcaccctatgcggtgatcggtgaagcgacggaagaactgcatttgacactgaacgatagccatttcggcaaccagcctatcgatatgccgctggatgtgctgctgggcaaaacgcctaaaatgctgcgggatgtcaccagccagcaggcgcagggcgaagcgttgaatcgtgctgaaattagcattgccgatgcggtaaaacgcgtgatgcatctgccagcggtcgcagaaaaaaccttcctgatcaccattggtgaccgcaccgtcaccggcatggtgactcgcgatcagatggtggggccttggcagattccggttgccgactgtgcggtgaccagcgccagtctggatagctattacggcgaagccatgtctattggggaacgtgcgccggtagccttgctggactttgccgcttccgcgcgtttggcggtgggtgaggcgctgactaacattgccgcgacgcaaatcggcgaaatgaaacgcattaaactgtcggcaaactggatgtccgctgccggtcatcccggtgaggacgccggtttgtacgaggcggtgcgcgccgtgggtgaagaactttgcccggcgttgggtatcactattccagtgggcaaagactctatgtcgatgaaaacccgctggcagcaggatggcgaacagcgcgaaatgacttctccgctgtcgctggtgattaccgcctttgcccgaatcgaagacgtgcgtcatacggttacgccgcagttgcgtaccgataaaggtgacaatgcgttgttactgatcgatttaggcgctggtcacaatgctttgggggctacggcactggcgcaggtttatcgtcagctcggtgacaaaacggccgatgtgcgcaacgtggagcagctggctggcttctttaacgccatgcagtcactggtagccgatcagaccttgctggcttatcacgaccgctctgacggcggcctgttggtgactctggctgaaatggcctttgccggtcactgtggtgccgaagtggatattcaggctttgggtcaggatgcgctggctgccttgttcaatgaagaactgggggcggtgattcagattcgcgccgagcaccgcgcggccgttgaacaactgttcgctaaacaggggctggcagagtgcgtgcattacttaggacgcgcgaccgtcggagacgatttcgtgatccgcagtggaaacgacacggtttatcgtgaaaaacgcagcactctgcgtctgtggtgggcagaaaccacctggcagatgcagcgcctgcgcgataacccagactgcgccgatcaggaacatcaagccaagcagaatgagcaggaccctggcctgaatgtgaaactgacctttgaacctcaggaggatattgctgcgccttatattcttaaacaggttcgtccgaaagtggccgttttgcgtgagcagggcgttaactctcatgttgagatggcggcagctttccaccgcgccggttttgatgcggtagacgtgcatatgagcgatttgctggctggtcgcatcgatctgcgaggttttcagaccctggtagcctgtggcggtttctcttacggtgatgtattgggtgctggcgaaggctgggccaagtctatcctgtttaataaccgcgtacgcgatgaatttgccgagttcttcctgcgtccggaaaccctggcgctgggcgtgtgtaacggctgtcagatgatgtctaacctgcgggaactgattccgggggcagaacattggccacgctttgtacgcaaccagtctgaccgctttgaagcgcgtttcagtctggttgaggtggctgacagcccgtcactgtttatgcaggatatggttggttctcgtatgcctattgcggtttcgcatggtgaagggcaggttgaagtgcgcgatcggcagcatctggccgctttggaacagcacaatctggtggcgctgcgctttgtgaataataagggtgaagtgaccgagcagtatccggctaaccctaatggctcagtgaacggtattaccgctgtcaccagcgccagtggccgtgccacggtgatgatgccgcatccagagcgtgttttccgcaccgtgagcaattcgtggcatccggaagagtggggcgaagatagtccgtggatgcgtatgttccgtaatgcgcgtaaacagttaggctaacgatccgttggtttaaatatctaaggggggcgaaatgcccccttttgcttatcgatatcacttatcgatattgattgacgtttggtttgtctgaatcggtcccaatttcttatcacaccgtgaagctatagcttatttctttcatttctttattattatctaagacttcaataattaacctatatgttcctggttgaatattgtgcattttgattcttattggtatcttgtcattattaataaaaccattaatgctgattagctctgcgttattgctgttgacgacataaatgtaatagttcagtctgccatgggcttcaaagtcgaatttaattttatattccgcagcttcttgactgtaataataatgtaggtctgttatttcaaagtcaggaatataactgatatgagataacggcctaatccctgaaatggccggtaacatagccaattgcccggtactgatgacggtcgagcgaatgtcttggcgagtgcgagttacatcattggcaaaggcggtggcagataaaatgattaaggtcgaacacaaaaatccgagtttatttaccgtcatacatcctcctgtgttatctgcgtcatggataacatgagtggcacttttattactgatagtgatttttttcggtgaatattatgaagcgttgcgttctatttcaggttttcatagctatgaaaatccctatgtaattttatgttaattaagattcagactgtctggttataaagatgtttggctgtgaagtagtataaaattcattgtgttttcaaaactgatatttttcgtattggaaactagccgaaatctaattacagatgtccactcatagttcgtcctcttgtattcgacactgcattaagacactgcattaaattgttcattaatcagttaactctctgttggcatcgggttctctggctgcgaggtagagcagccattttttgcctcgccggatgcggagctttgttccgagctagcgatgggttccttcgtcgacagcaaccgccgacagcaactctttgcgcgggcatctggctatgatgctgacaaattttccttatctatgaaatatcattatttataagtaacgagattaggtttgatgaattcccacatgagatgaagatctcaatttgttgaaaaatatatatttttatttttgtgtcggtaaattgcgacaacagcataaagcggtgtctcaaataggagacatataacttcatgatttttaatgtttttattattgatgcttttgggtgtcgtgaattagagacagaaggctaataacgcgttaactgtttaaccgttgtttttaagttataattatgaattatttaaataactgtttattttcaatgtcttagtatttttattttaaagttggcacggtaactgcattatcttaatcagttgctcattcacctttttatgacagccccgcagttaagcggaatatgcgcttcataagccatcgaatgacgcctaagaatggtgcctatcgtccacctaaaccgatattgccgcgcaagcgctttatcaagcatcggacgacacgttgagtgaggcaccgcctatgtcctactgtgatgaagggttcatcaatattggacatgtttggatgctattcgtctcatccccccgatgattgcttcggctcatcaaactggaggcgattttcagggcatccacatattcttgctaatgggggcaatagtgttattgcccctgttaagcaaatcagcaataccttcagattcgttcaaacatcgatatcgcaatcatttctcattcgattgagtgttgatacaacaggctgatcgcatcgatgaatcaaaattgtggaaaccagtttcctattaaaattaagcactttgctcatagcaggtgctttttttttgctcgaaaatcagcggtcgatgatttgttgatgaaatagtgcgggatttatgcggtaacagacattgtaatcctctgagagtcggttagcatcaaagcagaataataggtaatgagatgatttcgttgaaaagatggcgtttattccctcgttcgttgcgtcagctggtactgatggcgtttctgttggtgcttttacccttgctggtactggcttatcaggcttaccaaagtttggatcatttaagcgagcaggcggcagatatcaaccgtaccacgctggcggacgcccggcgcagcgaagctatgaccagcattgctctggaaatggagcgtagctatcgccagttttgcgtattgggcgatccgacacttgccaagctgtatcaacaccagcgtaaacagtatgcccaaatgctggatagccatggttcgatcttgcctgacgcccactattatcagactttacgtggcttactcactcagttggaagaaataaagtgccagaacagtgggccagatgcgcaatcttcggagcaactggaaggtttttctcgctctaacgccgaaatggttcaggccactcgtgacagtattttctctcgtggtcagcagttgcagcaggatattgctgaacgcggacagttttttggctggcaggcgttgttgctatttttggtcagcgtgattctggtggtgctattcacccgcatgattatcggcccggtgaagggaatcgagcgtatgattaatcgcctgggagaagggcgagcgctaggcaatacagcgttgtttaaagggccgcgtgagttgcgttcactggcgcagcggattatctggctcagtgagcgtctggcgtggctggaatcccagcgacacgagtttttacgccatatttctcacgaactgaaaacgccgttagccagtatgcgtgaaggaacggaattactggctgacgaggtcgccgggccgttgacgcaagatcaaaaggaggtggtagccattttggataacagtagccgccatttacagcaactcattgaacaattgctggattataaccgtaagctggcagacggctctggcgagcatgaaaatgtcgaactgttggaagtggttgaaggggttatttctgcccatagtttgccagccagagccaagcaaattcgtaccgaggtcgatctgcaagcggatatctgctgggctgaacccacattattaatgcgagttctcgataatctctactccaatgcggtgcactatggcgaggaatccggtaccatttggatccgcagccgtcaggtgggaaatcgggtacaaattgatgtcgctaatactggcactccgattccgctagccgaagaaaccatgatatttgagccttttttccagggaagccatcagcgaaaaggggccgttaagggaagtggactgggactgagcattgctcaggattgcatcagacgtatgcagggcgaactgcatctggtagaacaggatgatgcagccgtctgtttccgcattgaattgccattaaccgccgagaatgaataaataatgtacaagtggtctgtcagtcgcttttttaaaaagaccgaatctttgccgcgctccgccctggaggctgtcgcaacgccatcttatcgtaaggccgcttttttggggacgctgttacttgccccactactattgagtggatgtatcgatcgttccgccaacggacgcttttcccatgcggtgcagttggtgattcccgaaagcaaaattgtggattaccgcaccgctcaatgtgacacgctgtgggatatcgaagataaagaagttctggagaattcgctttattggctgagagcgatggactgtgccgagcgtttaagcaccgcgcagtccagagccttggccaaatctatgcaaaccctatcctggtcaacggcgtttaagcagggcattttgatcggcagtgctgatccatcaatggccgagcgtcgtcagatcgttgagcgtctaaatagctatagccagactttccccggttctctgcgcccgctgattcagctatggcgggaacagcaagtgctgcgtattgctctttccgaagaacgtgcccgttatcaacgtttacaggatgaatcggacagccagattgatcgcctgagggaaagtcaggtgcgtctgcaatatcatttacaggacaccacccgtaagctggaaaacctgaccgatatcgagcgtcagctttcttcacgtaaacaactgcaaaatgaaatttctgagcctgaggcagaaatcaaagccgccgctgggtctaatccagagccggccaaagcggctgaaatgaaagaagagaaagcggcagagaaaaagtcggtagaggcaagatcggtagaaacaaaatcgatagaaaccaagccggtggaaaccaagccaacagaaaccaaacctgcggcagaaaaatcggccaagccagtggaacccgcagctcagccgaccactccggtaacagcgccggaggccaaaccggcagaaacctactcgcctccggccacccagccgtcacccgcttccaaaaaggagtccgagccacatgacaccacgcaaaccggccaatctactgctggttgacgatgatcccagcctgctcaagctgctgggaatgcgtctgacaagtgaaggtttccatgtcaccacggctgaaagcggtcaggaagccctgcgcttattgatgcgcgagaaaatcgacttggtgatcagcgatttacgcatggatgaaatggatggtatggcattatttgccgaaatccaaaaatatcagccgggtatgccggtgattattctgaccgcgcacggttctattcctgacgccgttgccgccactcagcagggcgtattcagcttcctgaccaagccagtcgatcgcgacgcactgtataaagctattgatgccgcgctcgaactttccattcctgccggtgatgatagctggcgagaagccatagtgacccgtagtccgctgatgctgcgtttattggagcaggctaaaatggtggcccaatctgacgttagcgtgttgattaatgggcaaagcggtaccggtaaggaagtgttggcgcaggcaatccacggcgccagtccgcgcgctaaaaaagcctttattgccataaactgcggtgctttaccggagcaattattggagtctgaactctttggtcatgctaaaggggcatttaccggcgcggtaagtagccgggaaggcctatttcaggctgcggaaggtgggacgctgttcctcgacgaaatcggcgatatgcccttatcattgcaggtaaaactgctgcgagtgctgcaagagcgcaaggttcgtcctttgggcagcaaccgagatttggatatcaacgtgcggattatctcggcaactcaccgtgatttgccgaaagcgatggcaaaaaatgaattccgtgaagatctttactaccgtttaaacgtcgtgaacctgaaaattccggcgctgaatgagcgagcggaagatattccgctactggctaatcatctgctacgtgaatccgccaaacggcataaaccttttgtgcgcagtttctccaccgatgcgatgaaacgactgatgaccgccagctggccgggcaacgtgcgtcaattggttaacgtcatagagcagtgtgttgctttgacctcggcgccggttatcagcgaagcgttggtcgagcaggcgctggaaggggaaaacaccgctttaccgacttttgttgaagcgcgtaaccagtttgagctgaactatttgcgtaaactgctgcaaattaccaagggtaacgttacccaggcggcgcgaatggcaggccgtaaccgcactgaattctataaattgttgtcgcgccatgaattggacgccaacgatttcaaagaatagtgctttctttcctcggaacccgattggaaaaggcgttcggcgggttctaaacaaatgaccgggaatgatttacacttcggtctttgttgtggcatagcagaattgaaaccaatatgaacagaacactttccattgcgttagcccagcttaatctgctggttggcgatattgaaggcaacaccgagcgtatgttgcaaaccttacatgagcagcaaaaggccggtgccgatctggtcatgttttccgaactggcactgtcgggctatccaccggaagatttactgtatcgggatgatttctacctgcgctgtgaggcacagttagaccgtttacaggccgcagcgcaaaagacggcggttctggtagggcatccgtggcgtgaagggaataagctgtacaacgccctgtcactgttctccgaaggtaaattgcttggtcgctacttcaaacaacagttgcctaactacggcgtgtttgatgaaaaacgttatttcactcctggcaatgaaagctgcgtggttgagctgaaaggctatcgtttagggctattaatctgtgaagatctgtggttcaaccagccggtagacgctgcgaaagctgcaggtgcagagctgctgctgtcgattaacgcctcgccgtataaccgtgaaaaaccttatattcgcaaaacgctgatggcttcccattgccagcgtaccgatttgccgctgatttatttgaatcaggtgggcggtcaggatgagctgattttcgacggttgttcaaaagtgtttgattctaaaggtaatatgacgcatcgtctggccgcctttgcggagcaaacgacgctatgccgcttccaggatttggtcgtcgagcccatggcggcaccggcggcggggttgtctccgctggctgaagtgtatgaagctctggtgctggcagtgcgtgattatgtgaccaagaacggctttaaaggcgcggtactcggcctttctggcggtatagattcggcgcttacgctagcgattgccgtagatgcgctgggtaaagagaaggttcaggcgttaatgatgccgttccgctataccgcagacatcagtattgccgatgcgaaggaagaggctgaaatcctgggtatcgaattcgatattctatctatcgaaccgatgtttgatgcttttatgggacaactggcgccgatgtttgccggtactgaaaaagacaccaccgaagaaaatttacaggcgcgctgccgtggcgtggtgctgatggcattatcaaataaacgccgcagcattgtgctgactactggtaataaaagcgaaatggctgtcggttatgccacgctgtacggtgatatggcgggtggctttgacgtgctgaaagacgtacctaaaacgctggtatttaagctgtgcgaatatcgcaataccgtttcttacgtgatcccgcagcgggttatcgatcgtccgccgtccgccgaactggcgccggatcagttagatcaggacagcctgccgccttacgacattctcgatgcgattctggaaggctacgttgaacatgataagtcggtagccgatttggtggctgaaggctttgacgaggctattgtgcgcaaggtcattcgtctggtagatattaacgaatataaacggcgtcagtcggctgttgggccgcgcattaccgctcgtagtttcggcaaggatagacgctatccgatcacatccggctttggccgcaaaaattggtaaaacaggaattcgccatcatgaagaaaattgacgcgattattaaaccgttcaaactggatgacgtccgcgaagctttagctgaagtgggcattaccgggatgacggttaccgaagtgaaaggcttcggtcgccagaaaggccataccgagctgtaccgcggggctgagtatatggtggattttttacctaaggttaaaatcgaaattgtcgttgcggatgatatcgtggatacctgcgtagaagccattatgcaaacggctcaaaccggcaagatcggcgacggtaagatttttgtgtttgatgtcgcgcgcgtggtacgtattcgtaccggtgagcaggatgaagaagctatctaactgatactaaatcgaaaacattaaaatcaggtcgtatcatcgaaaagaaccccatttatggggttctttttttaccactaattgaatgctaatcgacgttgcgagtagcttgctgacgattgtctggcatttatccgctgtgcactgagttttccatcagaccggaacgacgaacaatccaagccaatagaacaggttaagcaagatacccgccagaatcactgcaacgacaggcgctgcaattttcattaccgggcggccaatagcttcattcaggaagtacaacgctgtggtaatagtgaaaccggtatagccagccattttgatagaagcaaaaatagcgccgatcagtaacgcatattccatcaacagattcatagcgttacggatattatccgaagcgttacgcactgaggggaagcggccaagccatttacctatagtgcgcagtaacagcacttctagcgagatcacgactgcacctaccaacgccgccaacagcgggttcggaatcaggtaaccgactacaaagacgaaggtgaaaccggctaccgcatacacgccggtcgcgagcgcagtggtggcaatcagtggcacaaagcccaagccacgcataaattcggccaatgaagcctgatgaaccagtgacagtgactcttccggcgtaatccccggcgcataggctttcgccagcgtataaatcgacacttcgctgccggcaaacagtttcatactggcgacggcggaaatcagcccaccgacgatggccaatagcggcaggttcttgattatcctctgggttcgctcctcaaatacggaatgtcctccaccaccgccgaggtgggttttggcgcgaagatcctgagcaatagctatgccgatgagcaataccatgccgacgaagatttcgatggattcagggaacaagccggtgaaacgagtgataaccaagcgggtcatcagcacgataattgctgaaattacagcagttttccagccaaactggtagaaaatagcgaccagtgggaacagcgcaaaagcagaaataactgggctgctcagttcacccaacgaaccgataaagttgactggcagagaggttaacgctgtgttgaccgcaggcagtgaagtcagcgccagaatgccccaggcggcacccagagcaaatgccagatagctgttgatcgccagcacgccgatgatgtcagtcggcaggaacagtaaccaggagttcagtaaaccggtggagagtgtaaaggaaatcccaaccgaagcgataaagccgacgctgaggccgaaagcgatactgcccgcttctctgcggctcatattaccttctaccaactgcggtaaaatcggacggataccgtcatgaaataccgcgacggagcggtgagaaagcagggcggtcatcccggttagcaaagcaaccacgatgatatgaatgtaatccacggttatccccttagcgcagctgagtgatcagcagcggaatggcgtgttcaatatgctccacggataaaccaaaggcgactttgccttcagcaatgaatttctcgatctgttccggtttggctttgatacccggtttggcaatggtcgcgcttttgttataaccaataatggctattgccatggataatgctgcaccggcaccggtattacatgcgccaatataataatccagctgcccatctttcacttttaccgctgcatccatatcggtcagaataaaagtttcaaagctggcgggcgcagttttatcgatcagttctcgtatcagctcacgttgtaacccgacgatgccgatctttttcatagtcactgtccttgcgtagagaagaatttgtttggattatggcgcagcatcatttccacctgctggtgtgaaatacctgcggccaaaagcattggaataaatgaatcaaccagataactgaaacctgtgccaccgttggcttttaaatgagaacggcgggtaatatccatcgaaagcatgactttatccaggacgccgcgctcagccagataaaccagcatggcgatgcgtcgttcatccgggaaatagctgtttttaccaatggtatcgaactggacgtacacacccttatcgatcatctgcaaaatcaaatccggctgttcttttaaatcgcagtggccgataaccacccgatccagcggcacgccatattgctccagcagcgcgatttgctgcattcccatagtgctaaagctggtatgggtcgaaatagccaaaccggtggcatggtgcgccagtgcggcggcgtgaaacacttttgcctcgttgtccgtgacacagttttcactggtaccaatctcggcgataacgccggctttcaggtcggtgccatcaatgcccacttcgatttcatcgatcatggactgcgccaattgttgcgccgagctgtcacgcaccaattgaggatagaaatgatcggtgtagtaacccgttgaagcgatgatgtttatgccactatctcgcatcagattcaataagaactgcgggttacgccccatgtatttattggtgacctcaacaatattgctaacgcctttgctcaccagctcgcgcatttcctgacatatcggctcgtattgatccaaacgacagtcgatgttgtctttaaaaccagataaatcaatatgcagatgttcgtgagcgtaggtatagccattggggttaatcattgggaaaggctccgggaaaccgatggacgcagttgagtgagaaaagattggccattttgcggcataggcgccgagaaaaacgcgcaggcggtcgcacctacgtcggataaagtaaggcgagtgcccagatcgacggcggaaagaccgagctgataaaccagcagtggcacttgttctcgggtgtgtttgccgtggccgatggttgggtcgttaccgtggtcggcaatgacaaccaggacgtcatcgggttgcattgcggcgattatctgattgagcgcactgtctaccagttgcagccggtcggcgtaacgcagggtgtcttgttgatgaccagccagatcggtttcctgaatgttggtacagataaaactgtctccgggtttgagcaattcgtcgcgcataatatcaagaatggtctgagaatcgacaatccccgcgtaattgattccattagaattacttactatatcggcaaccttaccgatcagtacagtaggaatatgtcgctgccataacatggctggagcctgcacctgttcatcgacaccataacccaaatgcgcgacgcgaaaattgtgtcgatagacaccggaatttggcgcattgataccaatatatttcccttcacgactttccgccgcccgcagcagatcggcggtatccggcaaatcgccgccaaaagcgataacgcgcccgactttaacagtttcacgaaccaattgaccgatggctagcacctgctcgaaggataatcgattgaagtcagcgctgatgttatacacctggcctaaatcggcttccagattatcgccgatcgccgcaccctgattcacccataaatagctcagattgtttaaggttatgcgttcgacctgatagccgttgccggtaagctgggatgcgacgtcatcaatcacggcggagaagggcatagaaagcggtggcagaggtaaagtgcccataatttcctgatggccaataaaggtatcgccaccttcatgttgcaataatattcgaccaaaggcggcggcgggattgggctgcattaaattcggagcgtagcctaatgagttgatcagaccgagtttttccagcgtgggtaaatataattcgggaagggtttcaagaatgtgcccgcaggtattggcaccgatatcctgcggccggacgagcgggacatccggcatttctccaataccaaaactatcaatgaccaataccatgaatttactcatggcaatctccttagttcaggctattcccctgactgtcatagcggccgattaatttcggttctccgcgttggatcccctcgaccaatgcgacgtcgctgcgtgtgacaaatatttgggtgcggaaactcattaccagcgggctgccgatcgggaatttatcgctcaaacgcaggcaataatcgatgctgctgtcatccactggcaataccttactgctgtggtaagcctggttgtgccatatcagtgcattgcttaggtggccacgacgatagtaaccgccgccgaagaagtagctggtatctccgacatgatgagagatttcggatagatacagcagcgagactttttccggctgagagccgtcttggttggctggaatagtaccggttagcgcatggcccggttcggtatgggtaacgcctaactgagccagttcgggcataacctgaatgcaggcggcagaaggcgcgttgacttgttcaacattaacgccctgtttttccagaatctctttagccgccagcagagtaaacatattggtggttggcagggttcgctgttcctgaggattaaacagcatgcaagggaaatgggtcacgccaaccagtcttaccgcaggcatattagcaatagcctgaatgacttccggcagttgattgagttcaaagccgccttcctgaccggcatagagcagatcgcctgcctggttgactttcaacatgattggctgagttttgccttgctttcgagctgcgtcagaaatttgctgcgctttctccagcgagaaaatggtgatgacttcaggttgctggctgacaatttcgtccaccatacccgacggcggctggaccaaatgcccgacgtgagccaccggaattccgtgctgatagagctgcctgacctctttaaaatccactgccaccacgccctgatagccgcatgccaacaggcgtttgcagagttcgggattacgtccgaattgcttactcatcaggtatagcttgatattgcaacgtctggcttcgtccagcaggctccgggcattggatagcgtttgatctacatcgataacgtaagtatccgggcctattttaccctgttgccacagcataatggctgtatcaatcagggttgggttctgttttcttaaggcattcaaaaacatgctgtttcctagacactttcaggcgtcattttattaatttaaattattatttttttgaatatttattatgtaatgaatcagcgttggtgtgttcttcagtgtagctgcttatctcaaaggtggtagattactggcaaggtaaaggctgtacaaattagacagcaagtaaccctgctcattatcatcaggcttaatatcaaagtaggctagcaaatcttgattaatgtctcgaatatattgaatatcttcgctttggattaattcggacaacaaatccgcatccattcccttaatcagttcgccacggcgggttcgcatcagggcgttagccatatgcgtcaccgccatttccccctgaacgttatcaatagatatctgccagaaattagctaatctattgataactttgttcattccgaggaaaacctcttcatcaattaccccagcctgatataaaatactgaggcgcggatccataatatctccggactattaattaataacgtgggtcaactttaccgagttggacatcactttggtgctgtaataattgctctgaattaatgccattctccaataatagttttattgggtgattatctggtctaatcaatatcacggcctgagaggcttgaatatagcgttcgtccccacgtagcttggttgcctgcaaattatcatgggaaacatcgtcagtcaggttccagatcgcagcgtcaatttcgccgcggctaatttgcgcgacgcagtcactgtaaggcacatcgacacgttctatattttgattggcaaacttaatttccgttaacagacattggtccggagagcgcggatccagcccgacgcggcgaatatcatgttcttcgcctcgacggcaaatcagctggtggccgtcaacgtaggaacccgtgcctaaattgagcgcaacggtaaccttaccctgatcaacataattctgtgccgccaaacgcgaaactaccgccatatcgtagatgccgtcgatcaaacactcgactcgcacttctgcaccacgcatatgggcaaaatacagcggcaaaatggtaaattgttcctttaatccgctggctagcccttcgtacagcttggtatagggcagcggcattgcgcagaccatattacccaaatctgcctgttgtagcaggcatgacatattgagatccataagctgcgttccgttgcggccacggcgctctacgacaatagcgccttcttgttccaataccttcaaggcgtgttgtaccacgcctacggaaatcgcgaaattatccgataactcgtcgatggttttcagtcgatttcctgggcgttcgccaattaaatagcgcgccatggataccagagccaacccttctttttttatgaattttctactcatgctgggtgtatttagccttatgttatctaggtgcagatagtgactttaatactattgattacaatgatattaattttcaattatatgaatatttaaacattcatataaataatagatgtttgcaacgataaaagcgagcgggggcgttattgatcacaatataagagcaataattatcttaggaaagtacagattcaatacaataaaaaaccggccaacaatacagactgaccgggaaagaaacgcagaaaaacttatcaattaaataactttgtgaggtccgaagcattcatagtgaatatgttctgccgggacacccatttccagtaattgtttaccaacaaactgcatgaagaccagagggccgcagaagtagtaatgcatatcgggatgaataattaatgactgcaactcagccagattcataaagcctttactatggtaatgctggccagggatatcctgctcttccggctggcgataccaaacgtggcgattcagattcggcatatttttcgctatttcagcgacttcatcggcaaaggcatgaacccggccattttccgccgcatggaaccagtgcacttcggcgctatgttgttgagcgtacagcgtatgcaacatgctcaacattggcgtttggcccacgccggcagaaatcagcgctaccggggtttccggtgaaatatcaaggaagaaatcgccgcgcggtggcgcaatgcgcacgatgtcgccttcctgcgcgatgttatgcaagtagttggataccgtccctttttcttcgcgttttaccgcaatacggtaggatttaccgttaggcgcagcggtcagggaatattggcgaatttgacggttttctaaccggctatcttcgatataaatacccaaatattgacctggtttgaaattcactacgctgccgccgtcctccggcactagcaagaagctgcagataacgtcgctttgcatttcttttttcgcaatgcggaaacgacgcagggttctccagccgccggtattttcttccacttcacgataaatttgctcttcgcgttgaataaacacgtctgccagcacaccgtaagctttggcccaagcatccaacacttcctgacccgggctgaataattcatccagcgtcgcaattaaatgtttgcctacgatttgataatcagacggctgaatattcaagctggtgtgtttttgagcaatacgttcaaccgcaggcagcatagccgaaagattttcaatgttggccgcgtaggcgcagatagcattaaacaaagcttcgcgctgatcgccgctgaactgattgctcatattaaaggtatctttcagctcagggttatgagcaaacatacgatcgtaaaaatgcgcagtgagcttcgaaccggtttcaaccagcaaaggaatggttgattttacggtggcgatggtttggctatccagcatggtgaggctcctataatttttcgaataataatgtgcaaattaatacatgtattttaaatgcatcttataaaaaacaacacggcttgtaaatacacattcattaatgagggcgattatcgttacgcgccagttcacacttatgaaaaaaccgcatactcaacatgaggataaatccgttgatttgtgtgaactcagagcagtgcaaagcctcatgtggcttgaagccaatcgtttgcgtaaaaacctctgtcaagacctatcttaacgaggtgaaaacagtttacactgtgggccagaacccaaacgggtggtccactaggtgtatttagttagctgagtcaggagagccggatgttaaagcgtgaaatgaacattgccgattatgatgcagatctatggcgtgcaatggagcaagaagtggtgcgccaggaagagcacatcgagctgattgcgtctgagaactataccagcccgcgtgttatgcaggcgcagggttcccagttgacgaacaaatatgctgaaggttatccgggcaagcgttactacggtggctgtgagtatgtcgatgtggttgagcaactggctatcgaccgcgcgaaagagctgtttggcgcagattatgccaacgttcagccgcactcaggctcacaggctaacgttgcggtttattccgcgctgctgaagcccggcgataccgtattgggtatgaatctggcccatggcggccacctgactcacggctccccggtaaacttctccggtaaactgtacaacatcgttccttacggcatcgatgaatctggcaagatcgactatgacgacatggcgcgtcaggctgaactgcataaaccaaaaatgatcatcggcggcttctctgcctattccggtatcgttgattgggcaaaaatgcgtgaaatcgctgatagcatcggcgcgtggctgtttgtagatatggctcacgtggcaggtctggttgctgcgggcgtttaccctaacccggttcctcacgcgcacatcgtcaccacgaccactcacaaaactctggctggcccacgcggcggtctgattttggcgaaaggcggcgacgaagaactgtataagaaactgaattcttccgtattccctgcaaatcagggtggcccgttgatgcacgttatcgccggtaaagccgtagcgctgaaagaagcaatggagcctgaattcaaggtttaccagcagcaggttgccaaaaacgcgaaagcgatggtttctgtcttcctggatcgcggctacaaagtggtttctggcggtactgaaaaccaccttttcctgctggatttggtggacaaagatatcaccggtaaagatgcggatgccgctttgggtcgtgccaatatcaccgtgaacaaaaacagcgtgcctaacgatcctaagagcccgtttgtgacttccggcgtgcgtattggttccccggctatcacgcgtcgcggtttcaaagaagcggaatccatcgagctggctggctggatgtgtgatgtgttggataacatcaacgacgaagcgactatcgaacgtactaaacagaaagttctggaaatttgcgcccgtttcccggtttatgcataatttctgcgagtttatatagttgttatcaaacccgcttcggcgggttttttttcatcaaatatccggtaatgaataaagcggaaacgccagataaaagagaatttcttcactcgtgatgtgaggtagcttgcaaactatttgtttggatgattacccggttgctagcgaagaagggctctgtcacagtatctggctgactccggaggaattatggtattgcaatcaacgcgctggctggcgctcagttatttcacctacttcttttcttacggtattttcctgcctttttggagtgtgtggttacaaggcgaaggtattccgccggaaaccatcggtatcttgttaggcgctggtctggtttctcgtttcctcggcagtttaattattgcccctagcgtgaaaaacccctcccatctggttactgcactaagaattctggctttgctgacgctggcatttgccatcggtttttggtttggcagtggctgggcgtggctgatgatagtcattgccggttttaacctgtttttcggcccgctggttcctttgaccgatgcgctggctgcgacctggcaaaaacagatctcaatggattatggcaaggtgcgtctgtggggatcgctggcgtttgtcattggttcagcgttgaccggcaaactggtatctgtttggggacataacgcgattctttacagcctgaccgtcgcggtagcggcgatgctgctgggcgtcttattacgcccaaatgtaatgcctaaaggcgagattcgtagcaatgtattaccggcgaccaagtggaaaattttactgtctgaagggccggtctggcgatttttgctgtgcgtgacgctgctgcaaggcgctcatgcgggttactacagctttagcgcaatttactggaaagaagccggttattcggcggcgactatcggttatctgtggtcgctgggcgtggtggccgagattttggtcttcgctttcagtaatgtgctattccgccgctggacggcgcgcggcctgctgctgctttccgctatcagcgggataattcgctggagtctgatggcatcgactaccgagctgcactggctgttgctgattcagattttgcactgcggctcctttaccgtttgccacctggcagcaatgcgctttatcgccgctcgccgtggcgcggatgttattcgtctgcaatccgtttactctggcttggcgatgggaggagggattgcggtgatgacggtgatttccggcttcctgttcgaacatattcagggcggtgtattctgggtgatggcgctggtggctgtaccggctctatttattcggccagcagtggtagcgaatccagaagacctggcggattaaggcgtttccagccaacgacgaatagcgatctgatctgcttttgttaacggtaaaagcacctgaattaacggcggcgttgactcgggtgtttctcgtttatagggagaaatcactagattggcaccgggcggtgcgccagattttaggtattcagaataagataagtatttgatatagagtggtagtagcgttagctcacgcagttgctgttctactcggtgctccaactccgggttcccgttggtcagtagtaaaatctgtttttcttgtaacgcattgccctgcatcagccatgcaccaaagctaatggcaatcagccctagctcatcggccgaaaattcaatctggtattcccgttcaaaatcgattaaagcttcgcgagtcgtccgtaacaagcggggatatttgctgctgatttcatccagtaaaatattatccacaccaatatgaaagcggcagcgctcgattgccggagccaaatgagcaaatagctggctgattaactcatcgtcactgctgaattccattccggaaatctgttgaaaacgtccaatcaatcgatgaatggaatccatcaggcgaacatcttccggagaatggttgctgctgtagctatgcgctttaatcatggtcaacgtcaggataaacacatccctttcgctgctggctaaggggcgggaaagctgattattcagtgtgcaaaacaggctctcggcggcggtcagttctaccttttggctcaaccacgtcacctgctgctgctctaactgcgggtagttttgttgctgattttcccaaaccgcgtaggccagataaatctgcaaaaaatagcggtcacgttcgtccagcgggcgaggtagaagctgttcacattgttccacgatatcttgtagcggcggtaatacggcattttcactttgccattgcagcgcctgatgtaacgctggcacaaagtttttatcgataaactcgggacaatagcgtagccctcggcgtagccaatgaatcagacacagccgtttatttagtaacgttccttgtagttggcagtcctcagccggattggtacgaatatccaggtgatagaaacgctggatttcgttcgccacctcagctatatcttgccgggtggtcggaagcccgacgccatttaattgactgatagtctccagttttaccggcaatgtcggagtaaacagcagcaataacgcatgacaacggcgctgttgaccggagagctcaggcactggtgtagtgtctaggctcataaaaccttccgaagtaagtttgattggtattatcacgctaagcatagcaaaagtgggaaaaccagcgcgctcgccgcaatagcttttacatcgggttacaacttacatcacaataattgctgtaaatccaagggttgatagatgttcaatgtgttatgttataacaattatgcgtcgtacaaatatatttggggactatttattggcgtggcagttttactgtatagcccctcagggctagcgcatccgcacagttttatcgagatggaaaccacttttgtggtggatgaccagaaactgaccggtatgaaaatggtctggacgatggatgaaattacctccgccgatctactttatgacgcagaaaatgccaaaagtgactcggaaatctggaagaaactggcggcggaagtcatggctaacgtcttggggcagcactatttcaccgatatttaccgcgatggaaagccggtgaaatacctgaatttaccgacggaataccatttgtcccgcaaaggacatcgggcggtattggcattcgtgatgcctttagccgatccgcagccgatggtcggtaagccttttataatttcgacttacgatccaacgtattttgtcgacatgacttacccggatcaggccgcaattcatttaccagatgaatggactaagcgttgtcaggccactttatttaccccaaatccggacgcatcgttacaggcctacgccttgtcgctagataaggaagactcccctggggaagatatggctttaggaaaacaatttgcccaacggataactctacaatgtcagtaagttttaccccggcaacccgccgtcagaaacactggttcgttcatctttggcctttggcattgttcctgttgtgtttggcgctggcggcgcaattggcttggtcgtactggcctgagttgctgtttaaaagcgtggtatggcaaaaaaccatgcaccagcaaatggcgcagctactgcaacaggtaaaagcaaatccgcatcaaacgggattggggctgatgtttttcagcctgatttatggtgtgttgcatgcggttggccccggtcacggaaaagtggtgattgtcacttatctggctacgcatcccgcgcggctgaaaagtagcctgaaactgacttttctagcctcgctattacagggcggagtggcaatagctttggtctcgctgatattaggcgtgttccaattatcctcccgttatttgcatcaaagcagctactggatggaaaagggcagctttttactggttatcctgttgggattgttactgtgtttccgcgcattaaagcggctttatcaccaaatcactctactcaagccgaagaaaatcactatccagcgtctgcaacctttaccggccgatcatgtacatagtgaaaactgcggctgcgggcatcgtcatcttcccagcgatgaggaattgcaggcgggtaacgattggcgaacccgtttggcggtgatactggcgatgggaatgcgaccctgttccggggcgattatggttttgctgtttgccaaagtcatcggggtatatgtttggggaatagcgtcggcgctggcaatggcgctaggaacttcactaaccatttcgctgctggcgctgtttgttcactacgcccgtcagttagcggtacgtttgagtcgggatcgcgcaccggcggcgtggggctccctcgcctgggccactttagcattggccggaggaatcattttactcttcgcgggagtattgctttatctttccagtcagccgtccatgatgggaggcgttcgtccatttggccgctgaatttcaaccataaaaaatgccagtcagcgtcaaccgactggcattgcaattcggactggaggctgaaaattaacgcttcagcgcttcactcaattcatcgttcattgcctgcaacatagatttcactacgcgcggattaccggcaacaatgttaccagagctgaaatggttatggccgccaacgaagtcggtcacgataccacccgcttcacgaaccagcagttcgccaccagcgaaatcccaaggcttcaggccaatttcgaagaaaccgtctacgcggccagcggcaacgtaagccagatccagcgcggcagaacccgtgcgacgaatatcagcacattgggtaaacagcttacctaacacattaatgtaggccggtgcgtgttgtttcactttgaacgggaaaccggtagccagaatagtgccatccagctctttcgcgttagtaccgcgcaggcggtaaccgttcagctgagcgccttgaccgcgagttgcggtgaacagttcattacgcattggatcgtaaaccactgccacttcagtgcggcctttgatgcgtacagcaatggaaacagcgaaatgtgggaaacgtttgatgaagtttgaggtgccatccagtggatcgataacccattgagtttcgtactcttcaccaagtaattcaccacattcttcactgataatggtgtgttttggataagatttacggataacgtcaatgatcagatgttctgcatcacggtcaacgttagtaacaaagtcattactgcctttctggctcgcttcgacagcgtccggggtttcataatttttggcaatcaggttaccggccttacgcgcagcgcgtatggcgatagtcagcatcggatgcatgggtatcttccaactaggatgttaaagaacgagaaacggcgcgtagtatagcaggggatctgataaatgcctacgcttgtgttaagatgttgcgattccccgctaccctcagagtttgtatgttgcacaatattcgcattgttttggttgaaacttctcacaccggaaacatgggctctactgccagagccatgaaaaccatgggattaactaatttgtatttggtcaatccattggtaaaacctgattctcaggccatcgcgctgtctgcgggtgccagcgatgttatcggcaatgccaccatcgttgacacgctagatgaggctctggccggttgcagcctggtcgttggcactagtgctcgctctcgcacgttgccgtggccgatgctagaaccgcgcgaatgcggcgttcgcagcgcacgtgaagccgaacatgcaccagtggcgctggtgtttggccgtgaacgcgtggggctgactaacgatgaactacagaaatgtcattaccacgtggcgatcccggcaaatccagaatacagctcgctgaatctggcgatggccgtgcagattctggcttatgaagttcgagtggcattcctcgatcgtcaggcagaaatcgcacctaagcaggaagaggaagaagcgccttatccactggtagacgacctggagcgtttttaccagcatctggagcaggttttatcccacaccggctttattcgtcaggcacatccggggcagattatgagcaaattacgccgtctgtttacccgcgccagaccggaaacacaagagcttaatatcctacgtggaatgctgacttcgatcgaaaaacaggataaacatcagaaaagtgccaataacgccaaaatggcgaaagataaagaatagtcatatatatcatgttgatatatgactgtttggcacaaatatataaggatgacgaggcataaaatacttgagtgaattactaggttaaatagttgactaaaacactcaagaatggcagacttctagctcgtttcaccaacaggtaattttaagctatgagactgacatccaaaggtcgttatgccgtgaccgccatgcttgacgtggcattacattcccaggacgggccagtacctctggcagatatttctgaacgtcaaggaatctcgttatcttatctggaacaactcttttcacgtctgcgcaagaatggcctggttgccagcgtacgtggtccgggcggcggttacctgctgggtaaagacgctggccagatcgccgtaggcgcggtcattactgccgtagacgaatctgtcgatgcaacccgttgtcagggtaaagaaggctgccagggtggcgatcgttgcctgacccatacgctgtggcgcgatttgagcgagcgtatcagcagcttcctgaacaacattacattggcggaactggttaataatcaagatattttggaagtagcggatcgtcagaacaacgatacgcgtcgtacggccaacggccgaccgcaagagacgattaacgtcaatctgcgcgcataagcagagtctgcgggatcttcagtttttggaagtgatgtacggagcataagagcaatgaccgaatcaaaagtaaaaacgccgatctatctggattattcagccacaacgccagttgatccgcgtgttgctgaaaagatgatgcagtatttgactttggacggtatcttcggcaacccggcctcccgctcccaccgttttgggtggcaggcagaggaagccgttgatatcgcacgtaacgacatcgccgcgctagtcggtgctgacccacgtgaaattgtgttcacttcgggtgcgacagaatcaaacaaccttgctattaaaggtgccgccaacttctatcagaagaaaggcaagcacatcatcacctgtaaaaccgaacataaagctgtgctggatacctgccgtcagttggagcgtgaaggtttcgaagtgacctacctggcaccgcaaagcaacggtattatcgatctcaaacagcttgaagctgcgatgcgtgaggacaccattttggtttccatcatgcatgtgaataatgaaatcggtgtggtgcaggatatagctgctattggtgaaatgtgccgtagccgcgggatcattttccacgtcgatgcgactcaaagcgtaggcaaactgcctatcgatctgagcaaactgaaagtggatctgatgtccttctctgcccataaaatctatggtccgatgggcattggcgcactgtttgttcgccgtaaaccgcgtattcgtattgaagcacagcagcacggcggcggtcacgagcgcggtatgcgttccggcactttgcctgtgcaccaaattgttggcatgggtgaagcttaccgtattgccaaagaagagatggaaagcgaatctaagcgtttatcctcactgcgtaagcgtctgtgggatggcctgaaagatatcgaagaagtttacctgaacggcgatttagagaatggcgcacctaacattcttaacgtcagcttcaactacgttgaaggtgaatcgctgattatggcgctgaaagacttggccgtttcttcaggttcagcctgtacctccgcaagtctggaaccttcttacgtgctacgcgcgctgggcatgagcgatgagctggcacacagttccatccgtttctccctgggccgttttaccactgaagaagagatcgactacaccattgcgctggttcgcaaatccatcggtcgcctgcgtgaactgtctccactgtgggacatgttcaagcagggcgtggatatcaacagcatcgaatggtcacatcactaattccagactttcagattcaggagcactcaaatggcttatagcgaaaaagtaatagatcattacgaaaacccacgtaacgttggttctttcgataacgaagatccaaccgttggtagcggcatggtcggcgcgccggcctgtggtgatgtgatgaaattgcagatcaaagttaacgaagccgggattatcgaagacgcccgctttaaaacttacggctgcggttccgccattgcttccagctcgctggtgaccgaatggatgaaaggcaagtctctcgatcaggctgaagcgatcaaaaacacgcaaatcgctgaagaactggagttaccgccggttaaaatccactgctcaattctggctgaagatgccattaaagcagcgatcgccgactacaaaagcaaacataacgctaagtagttgtaaatcagtataaataacctgtctgtggttagggcaggttctcagaaatgaggttgttgtatgtcgatatctatcagcgacagtgctgcgcaacgtgtcagcgccttcttggaacaccgtggtaaaggtttgggtttgcgcctgggcgtaagaacctccggctgctccggtatggcgtatgtactagaatttgttgacgaaatgaacgatgacgatatcgtttttgaagacaaaggcgtgaaagtgatcatcgacggtaaaagcatggtctatctggacggtaccgaactggatttcgtcaaagaagggctgaacgaaggctttaagttcaacaatccaaacgtttccggtgaatgcggatgcggtgaaagttttaacgtttaatcgttagtttttgccttatatcgtagcgctatactgacgtttgctgatttatctggctctcttccatgccgctgaggcgggaagggagctgcataaacccctcactcagccacacgacaacttccgagcatgctatggattacttcactttattcgggctgccggctcgctatctcgtagacgccagccaactcacttcccgctatcaggaattgcaacgccagttccatccggatcgctttgccagccagccagaacgcgagcgtttgctggctttgcagcaggctgcgacgatcaatgacgcctatcaaaccctcaagcatccgttaaaacgcgcagagtatatgttatctttgcagggttttgatttgagcaatgaacagcacaccctgcgtgataccgcgtttctgatggaacaattggaactgcgggaagagcttgatgccattgaacgtcaggccgatgccgaaagcgcattagcggcttttaacgcgcgtttggcggtaatgacacaaaaacgtagcgagcaaatggtgcaggaactggataaccagcaatggatcaatgcggcggatactgtgcgaaaattacgttttctggacaagttacagcagcaggttgagcagttggaagaacgtctgtttgacgattttgcctaagagtcaggccgcggttagcaggcttgtgccctgaactgttaatctcatgcttatgatagtgaacgaccaaacgtatcttttaaagaatccctgaataggctgaacatgcctaaaaaagcagggcgttggcgtttcgcttgagaaatttttgtcatttatacccaatagattacccgctgtcgttttaccctgcggcagcctgcaagttaaagggtatagattcatgattgatggaagctcaacatggccttattacaaattagtgagcctggtttaaccgcggcgccgcaccaacgtcggctggccgcaggtatcgatttaggtactaccaattccctggttgctacggtgcgcagcggtaaagcgcaaaccctggcggatagtcagaaccgagatttgttaccctccgtggtgcactatcagcgcgaaggcattgatatcggttgggaggcacgtcagcaggcggcgcaggacccagccaataccatcagttccgtcaaacgaatgatgggacgttcgctagcggatattcagcagcgttatcctaatctgccttactccttccagccgagtgaaaacggcctgccgatgatccaaactgcggtggggctggtcaatccggttcaggtctcagccgatatcctcaaggctttgtcgcagcgtgcgcaggaggccttagaaggccagctcgacggtgttgttatcaccgtaccagcctattttgatgatgcgcaacgtcaaggtacgaaagatgcggcgcgtctcgcaggtttacacgttttacgcttgcttaacgaacctaccgcagcggcgattgcctacggtttggattccggtcaggaaggtgtgattgcggtttacgatctgggtggtggaacctttgatatttctattctgcgcctgagtcgtggggtatttgaagtgctggcaaccggcggggattctgcgctgggcggcgatgactttgatcatctgttggctgactggttacgtgagcaggctggaatttcctcccgcgacgatcacggtgtgcagcggcaattgctggatgcggcgattacggcgaaaattgctctgagtgatgctgacgtagcggaagtgagcgtagcaggctggaaaggggaaattacccgtcaacagtttgaagcgctgattgctacgctagttaaacgcacgttaatggcttgccgtcgtactctaaaagacgccggtgtcagcgctcatgaagtgctggaagtggtgatggtcggcggctcaacgcgcgtgcctttggttcgcgagcaggttgggcagttcttcggtcgcacgccgctgacgtccatcgatcccgataaagtagtcgccatcggcgcagctattcaggctgatattctggtgggcaataaaccagacagcgatatgctgctgttggatgttattccgctgtcgctggggttggaaaccatgggcggtttggtggaaaaagtgattccacgtaataccaccattccggttgctcgggcgcaggaattcaccacctttaaagacggccaaagcgcaatgatgattcacgtgctgcaaggtgagcgagagctggtacaggattgtcgttcgctggctcgatttactctgcgtggcttaccgccgctgccggccggcggcgcgcacattcgcgtgacttttcaggttgatgccgatggtttgctaagcgtgacggcgatggaaaaatccaccggcgtagaagcttcaattcaggttaagccgtcctatgggttatctgatgacgaaattgccacgatgatcaaagattccatggcgaacgcgaagcaagacattaatgcgagaaaactggcggaacaacaagtcgatgcatcacgggtgctggaaagtttgcagggcgcactggcggaagatgccgcattgctgagcgaacaggaaagcgcggcgattgcgcaggccgtggaagtcttgcagcaaagcaggcagggcagcgacccggcggcgattgaagccgcaatcaaatcgttagatgcacaaacgcaaaactttgccgcgcgtcggatggatgcctctatccgtcgtgctttggctggccattctgtggatgaggtttaatcatgcctaaaatagtatttcttccgaataaagaccattgtccggatggtgccgtatttgaagcgcgtcaaggtgaaacaattttggacgttgctctgcgtaacggaattgatatcgagcacgcctgtgaaatgtcctgcgcctgtactacctgccattgcgtagtgcgtgagggctttgattccctgaatgaaagcaccgaactggaagacgacatgctggataaagcctggggactggagccggaaagtcgtctgagctgtcaggctcgagtggctgatgaagatctggtggttgaaattcctcgctacaccgtcaaccacgctcgcgagcactaatggatattattcgtcgatccgctttgggcggcggcggataaaggagaaacgaatgagtttaacatggcaagacacgcgggaaatcggtgaagcgctgtacgatcagtttcccgatctcgatcccaaaacggtgcgttttaccgatatgcatcagtggatttgcgatctggaagagtttgatgacgatccggcgcgatcaaatgaaaaagtgctggaagcgatcttactagtctggttagatgagttcgagtaaatatctctggggtcgcgttggcggccccgtttctttttgataaaactgtttcctataaaaattttctataaatcttttcgtatcaatcgctttgtattcgaggctggtttcgcagaccagtaactaagtagctgaaatacagcaataaaagaataacgacgaggaaagctatgactacagaaattatgcaagtatccctatcaaccaatccggcagatgcccgctggggcgagaaagccctgttaagtaccaacgatcaaggtatgactattcacctaacgggcaaagatgctctgggtgtgattcagcgtgcagcgcgtaaaatcgacggacaaggtattaaaaaagtgaagctggccggtgaaggctggggtttggaacaaagctgggcgttttggcagggtttccgtgggccaaaaggtgagcgcagcgttgaatgggcagaattgccagagaacgatcgtcaggagctggaacagcgtctgaaaattattgattgggtacgtcacaccatcaatacccctgcggaagatctagggccgaaacagctggctaaaaacgccatcgatctgatgtgcagcgtagcctgtgatgctgtcagctaccgcattaccgaaggcgacgatttacgagagcaaaactatgctggtattcataccgtaggccgtggttccgatcgttctccggtactgctggcgttggattttaacccaaccggtaaccctgatgcgccggttatggcttgtctggtcggtaaagggattactttcgattccggcggttatagcctaaaacaaagcgcctttatggattcgatgaagtccgatatgggcggcgcagcgactctgaccggcgctctggcattagcggcagctcgcggtttgaaccagcgtgtaaaactgtatctgtgctgtgcggataacatggtgagcggcaatgcctttaagctgggcgatattattcgctaccgtaatggcaaaaccgttgaaatcatgaataccgatgccgaagggcgtttggtattggccgatggtctgatcgatgcatcggagcaaaatgcgtcgctgattatcgatgcagcgactctgaccggcgcggcgaaaaccgctctgggtaatgattatcacgctttgttcagcttcgatgatgaattggcgcaggaactgctggaaagtgcgaaaagtgaaaatgaaccgttctggcgcttaccgctggccgaattccatcgcaaccagctgccgtccaactttgccgaattgaacaacgttgccgcgccgtcttatccggccggtgctagcacggcggcgggcttcctgtcccacttcgtgaaaaattatcagcaaggctggcttcacatcgattgctccgccacttatcgtaaaggtgcagtggatcaatggtccgctggcgcaaccggtctgggtgtgcgcaccgtagctaacctgctgctggcgaaagccaaatcataggtcgcagctgaagcagttttaccaagtctgtttgaataatctggggcgcctgctggtgcccctttatcgatctgcatgattcctaattgattgctgttttggagtatgaaatgagttttccgcatcttccctcatctgatcatgactatagccatgaccatgaagaaaataccggtgaaaatgagctggagaagctattaaaactggcggcaagtgagtctattcaccgaccggcctttttccgtgccttactcgatgccaccgttttggtattgggcgattccgggcaggaaagtcaggacggtgaaatgactttctccgccggtaatggggtgaatattctgcattgggaaaaacagggcggcgaattgaccattccttttttttcttcgctggaaactttgcagcaagcgatcagtcaatctgaaggcgaaaaagagcagccttttgtggcgatgccggtacgcgtgctgtttgaaatgacgcagggagccagcctgtttttgaacccgaaaactgaatatggcaaagaattctatccggaagaagtggctatgctattggccaacggtggtgtagctaaaccaacggaaatggtggtggataaagaaacgcagattctgcttggacaaccagaagaatatccgtcggtgattgttgatgcgttaaccaaactattcagccagcgcaagccggtgcgccgagcatttctggcgttaatgcatgataaaagcgtggatgagaaaccgaatttgctgatcgggctggaagtggatggttcagaagaagaaattgaaattctgattcaggaagccggtcatattgccagcgagcacgcgccagacgatagcccggttgatttttgcgtggtatcggaaaaagaacgaggcgttagccattatttgactacgcatacgcagcctttctaccaacggaaatggggcagttggctgcgaaatagcattccttcatcagggcaggcgtaatttatactggacggaagccgctgagtttccgtcctattcttcgtatttatcattacttcgaaacgatttcttcaacttttccttcactctttgtcctcaagtgactaaatcccgtaaacatccctttccttttttaactttaataagataatagcgcctatgtgcgatggcttattcgctctctcagccagggaaaaacagaatgaatccataccctaagaaggtatttcagtcaggcaagaaaatttgtcagggaatgatgttggccggcgcggtattactgatggcggcctgtgatgagggcgataaaacatccgccgtcgccaatgccaaacagactaacgcggctgccgttgtacccgctgccgccaaaaaaaccgatgccgcctcgctggcggaaatggccaagcgttttgccggtaagcctttgacactgcttgatgcttcagagcttcagctagacggtgccagcggaatggtattgaccttctccgttcctctcgatcccaatcaggattttggtgcgcaggtgcatttggtcgatacccaaagcgggaaaatcgacggtgcctgggagctgtcagacaatctgaccgagttgcgtttacggcatttactgccggaacgtaaactgctgctaacgctggacgctggcctaaaaggcattagcggccaaacgttaaccgtaccggaaccgcaaaaaatcaccactcgtagcattaaaccgagcgtaggttttgccagcaaaggttcgcttttgccaaccaaattggcgcagggcttaccggtaatggcgctgaatgtcgatcacgttgacgttaactttttccgcatcaaaccggccaatctggctaatttcatcgcgacctggcagtaccgaaattcattcggtacctgggaatctgatgaactgctgaaaatggccgatctggtgtataccggccgtttcgatcttaatccacagcgtaatacgcgagaaaaaatcctgctgccgctaggagatatcaagccgttgcaggaaaccggcgtttatctggcggtgatgcaacaggcgggacagtacagctatagcatcgcggccagcatgtttacgctaagcgacattggcgtttcggtacatagctatcgcgatcgtctggacgtcttcgctcaagggttagaggggggggccgcgctgaaagacgttgccctacagctattggatgaaaaagggcaggtgctggcagaagggaaaaccgatgctcagggccacgcccagttagaaaaaaatgccaaagggaaactgctactggcgagcaaagatgggcaaaccagcctgatcgatttggtggctccggcgctggatctggccgaatttgaaatcgctgggccggaaggttatcaaaaacaattctttgcctttggtccgcgcgatctttaccgaccgggtgaaaccttgattgttaacggtttactgcgggatgccgacgggaagcctctcgccgctcagccagttaaagtcgacatcgtcaagccggataatcaggtggcccgcagctttgtctggcagccacaggacggcttataccaataccaatatgcgattccggatagtgcgctgaccggggattgggcgctgcgctttgatttgggcgacaaccagccgcgtttatataaattcaaagtggaagatttcctgccggaacgcatggcgctggatatttccaccagtaaacagccgttgagcaccgatgccgcgttggcctttgacgtgaccggccgttatctgtacggcgcaccggcggcggataaccgtttgcaaggacaggcatttttgcgtccgcagcgagaggcgctaaccgcactgcccggctttgaatttggttcagtggcggaagagaatctttcccgaactttggatgaatttgataccgcattggataaaaacggcgaactggccgtgcaaatcgataacagttggagcggcgttaaatctccggtgaaagtgattttacaggcgagtttgctggaatccggcggtcgtccggtaacccgtcgcgctgagcaggctatttggcctgcaaaagaattggcggggattcgtccattattcagcaagcgaaacgtttatgactatgtttccgataaatatcgttcgcaagcgatggtggatgtcgatagtcaggccgagtttgaggtggtttatgccaacgcagccggagagaaactggcggcaaaaggcctgaaagttcgtttgatccgtgaacgccgtgattactactggcagtggtcggaaagcgacggctggatgtcgcaatacgataaaaaagacctgatgctggacgaaaaaaatcttgatatcgccgcaggcagcagcggcaaagtcagcttcccggtggagtggggggcttatcgggttgaagtgagcaatagccacaacgatttggtgagtagcactcgtttctgggccggttacgattggcaggacaataccggtggcagcggctcggtgcgtccggatcaggtaaaactgaagctggataaaccggcttatcgtccgggtgaaaaagtgaaattacatgtggaagcgccagcggccggtaccggttatttgctggtggagtccagcgacggcccactgtggtggcaggaagttgcggtgccagtcggcggtgctgacgttgaggtgccattgaataaggattggaaccgacatgatttgtatctgagcgccacggttattcgtccgggtgataaaacggtgcaatccacgcctaaacgtgcggtaggtattctgcatctgcctttggcagatgaagggcgcaagctaggtctgacgctggatgcaccggcgcggatgcgtccgaatgagacactgacggtcaaagtcaaagctaacccaatagacggtaagctgccgaagaaagtgcaggtgctgttgtccgccgtggatagcggaattctcagcattactgattttgcgacgccagatccttacgatgctttctttgggcgtaaacgttatagcgtcgatcaatatgatgtatacggccaattgattgaaggtcaggggcgtttgggtagcctgcgttttggtggggacggcgatgaggaagacgctctgtctcgcggcggtaaaaaaccgataaccgaagtgaccattgtggctcagcaggcgcagccggtgacgctgaatgaacaaggtgaaggctctattcagttagctattccggatttcaacggcgaattgcgtttgatggctcaggcatggagcgatgaagattttggtaaagccgaaagtaaagtgatcgttgccgcaccgctgatcgcgcagttagccgcgccgcgcttcctggcgggtggagaccataccgaactggcgctggacttaagcaacctgtccggtcatccacaaaatttacaggtgaaactcagcgccactggtctgatcgcgttaaacggcgcaggggaacagcagctttctctggccaacggcgaacgtaaaactctgctgattccggtgcaggctctgaacggtttcggtcagggggatattggtttggttatcagcggcgttgccctgccaaatgaaaatctaccggattatcaacatcactggaaaattggcgtgcgaccggcttatccggcacagactcgccatttcgccaatattctgcacagcggcgaaagctggatactaccgccagaggccactgaaggtctggaacaagatacccttgaaggccagttgttgttaaccagccgaccgccgttaaacgtggcgcgctacatcagcgagctgtatgcctacccttatggctgtctggagcaaaccgttagcggcctgtatccgtcgctgtacagcaattatgcccagttaacttccattggcattaaagccgatagcgatgaaaaacgccgtaaatccatcgataccggcatcgaacatctgctgagtatgcaaaaggataacggtggatttgcgctgtgggacaaacagggttgggaagaacattggctgacggcctatgccaccgatttcctgttccgagctagccagcagggttacagcgtgccagccagcgcgctgacggcggccaataatcgtttactgcgttatttgcaggatccaagccaaattgagatgcgctacagctccaatgatctgcattcacgctttgcggtacaagcttacgctgggctggttttagcttcgcagcagaaagcgcctctgggtgcgctacgtcagttggccaaccgcagtaaagacgcccgcaccggcttaccattggtgcaattgggtatcgcgctgaaaatgatgggtgatatgcctcgagccgaagtcctgctgacgcaggggatgacgacgacacgcgctaaaaccgattattggttgggagattacggcagtgaaattcgtgacaatgctttgattctctcattgttaacggaaaacaacctattgccgcagcagcgtgatagccggttgctgtcgttgtctgagcaactcactggaaagcgttatttatcgacgcaggaaagcaacgcggtatatctggccggacgcactttaattagcgccaatgaaacgccgtggcagatcgctttcgcgacaaatcacgcggaaggggcggcagaaactcatgacaaaccgcttagccagaattggtctgctaagcagctgaccgaaggtttggcgctacagaatccggggagcgcggcagtttatagccgattagatttagtaggttatccgcagatggcaccaacgccttctaacaataatctaagtatcacacgtacttatctggatatgaacggtcatccggtggaattggatcaggttaaaagcggccagttaatcgtggtttacctgagagtgggcgctaaccaacgggtgcctgatgcgctggtggtcgatttactgcctgccgggttggaactggaaaaccagaatctgggtgacagcagcgccagcttgggggaaagcgccagcgggttgccggagctacagatgaatatgcagcaggcgaccattaaacatcaggaattccgtgacgatcgctatgttgcagccgttgatgtcgatggctacaacttcaccacgctgctgtatctggccagagcggtcacaccgggtacctacctgattccaccgccgcaggtggaatccatgtacgtaccggaatggcgtgctgtgggttcaacgccaacgcagctacgcgtactgaaataaactttctggcctctttgttgcggattatctgtgcaaaggggccgaaatcatcgcctgatgactcgttttttccgctctcgccgccgtttctggcttgctttgctgtttatctcgctgctgctgccggcggctatctggctggctgatagagcctggccgctgcctctaactgatgtacaaatggcacggattgtggtggcggaagatggctctcccctatggcgttttgcagatgatgacggcgtctggcgctatccggtcagtatcaaacaggtttctccgtattatttgcaagcgttgctaacctatgaagatcgctggttctatcatcatcccggtgttaatccattatctctggcgcgtgcggcctggcaggatctccgtgcggggaaaatactctccggcggcagtacgctttccatgcaggttgcgcgcctgatcgatccacatcctcgcactttaggtggaaaactgcgtcaggtctggcgcacctttcagttggaatggcatctgtccaaagaccagattttggagatttacctgaaccgcgcgccttttggcgggacattgcagggcatcggtgccgccagttggacttatttaggcaaagcgccggacaacttgacccaaggggaagcggctttgctggcggtactgccgcaggcaccgagccatttgcggcccgatcgttaccctttacgtgccaaagcggcgcgagacaaagtattaacccgattggcgcagtacggcgtctggcctacgagtcaggtgactgaaattcaacaggaagatatctggctggctcctcgtcaggtgccgcaactggcacctctgctggctcgccgtctgactctcggtaaccagcgcgaacttattcaaacaacgctggacgccggtttgcagcgccaactggaagatatggccgccggctggcggcaccagttgccggagaaaacctctctcggtgtgctagtagtagaccacacaaccatggaagtgaaggcttacatcgcctcggttgatttcggtgatgacagtcgtttcggccatgttgataccatcagcgcgtggcgttcacctggctcgacgctcaagccctttttatatgcgatggcattagatgatggcctcattcacggcgaatccttgttacaggacgttccgcgtcggtttggcaattatcgtccggggaattttgataccggttttcacgggcctgtgagtgctagcgatgcattagtacgttcgctgaatctgcccgcggtacaactcttggaggcttatggctccaaacgttttgccgccaatttgcgcaatgccggcctgatattacgttttcctctgcacagcgaacctaatctggcgctgatattaggcggaaccggcgcacgtttagatcaattggttaccgcttttagcgcctttgggcgtggagggatggccggacagctacgtttcgagccgaagcaaccgttgcttcagcggcggctattttcccccggcgcggcgtggattgtacgacggattatggcgggagaagggaggccggtgcccgacgatattttacctgcggttgtgcctttggcatggaaaaccggcaccagttatggttatcgggacgcatgggcgattggcctgaacgcccgctatacgctgggcatttgggttggcaggcccgacggcacgccggttgcagggcaatttggctatgctactgcggtacctattttgcatcaggttaatggcgtgctcatggcgcgcttgaatcagggaaatcgagcattaccgatcgacccgcggcctgaatcagtgagtcgggaagagatctgctggccgggcggccagccattgccagccggtgacagtaactgccgtcagcgacgccagagttgggtactggatggtactttgccgcccacactggcggctcccggacaggaaaatatccaaggtagccagatgaatatatggctgaataagcaaggtcagcgagtggcggcagattgcccggacgctacgccgacccgtttaactctctggccgttgccgcttgagccttggctgccgtgggcagagcgtcgtgcgcagcgtttgccaccggtaaatgccacctgcccgccgctagcggaaaatgacagtcctccacttttgattctgggtattcgggatggggctgttgtgcgtcgtttaccgggtaagaacagtctggatttacgattggaagcgcagggcgggcaaggggaacgctggtggttcttgaacggcgagcaggttgctaccactcaaaatcatcaatcatggctacaaacgctgacggctccggggcgttatcagctaaatgtgttggatgaaagcgggcaagtcagcaacgttgaattccgactggagtaagaaagtccaaattatcttaattaaaaaacgcaatgcatatggaaatacgatgtatttgttgtttttatattaaaaaatagtgtaaccaataaaatgttgattttatataatcccaattgattttttttattatttttaacctcggctattgatgattttctttcaaagtgaatttttttatttttatttttatttttatttttctttatcaacaatcaacaatcaacaatcaacaatcaatagcaatattggagttttgatgatgaatataaaaatattatcaattataatttttatcacaatattttcctgttttgacgtattgtccaatgagccaaaagtctgtttctttatgaatgatagttatcgaggcgagtctctctgtgctggaaaaaataactcggtggaaagtattcctgaaagatggaatgaccgtatatcatcggtagttattcctcagggattgtctgttaatgtttataaagatattaatttctcaggcgaaaaattagttattaaacaaaatactgactttgttaaagacgaaactaaaataggttttaacgatgagattagctcatttgaagtaaatagtacggcatgtttttatgaaagtgatgagttttctggaagtgcagtatgtctggcggcaaatgaaagtatcgatctttatagcaataactatcatagcaggaaaaactaccacattcttaatccacttaacgatcagataagttctattactgttccccaaaatatgcaggcggttgtttatgaagacgatggttttcaaggggaatattatgttttgacggaagactttacatatcaggatttagaaaaattaaatattaataatagaataaccagtatgcgggtttttcaaaacaatacctttacttgcgatcagcgctgtgtaatcaaagacgttatgcgcattcccttagggaaggcttttggtcattattggttggatgaacgtttgagttctaaagaagtattgataagttttataataaataatgatgatgactattctatttcattcgttgacggtggtgttcttcgagtaaaggatagagaactgtattttatgcatcataataaatacagcagttttatttttcgggttaatgatgatagcgatagattgtcatttctctccagattcaatggtgactattttgaaatacagtttgttgagtcgaaaggaacgagaagtgcttatgtttccccgttgtttagttcactctttaattctggaaaagaaaccgttgattttaaggttagtaatttcaaccttgaaacacccgttgtcattgacaaactggtattaacaggagagcagggaagcaaccgacaaacccgtagcgtgatgggattattatcttgctggtcggtgccgatgctcagtatttataattatgtgattcagggaagctgtaatcagactgacagatttgtcagcaatgccaatgagttctttaaaaaaccgaacgataagatattgcaaatatcgggttcggcaaaacctttacctaaactgaaatcgaatgaaacctttcagacggagcctcaaatcataaatttgcagtctgaacccaaaggtattctcactcaagttcattccgatatgaacggtaaggccttaacggttcctgcgacggcgctggcttgcaaagtttcaatgaaagatcagttacttcctcaactacgctctcgccgtgatttgtctcctgtatgtattgaatggaccttgaatattctcaccgattttactttactgtttggtggcagcacggataactggaatgcggagaattttggacaagttattgaccgaattatacgaaatggtgataccgggcatgccgtatctgatattgaaactgaaactcgtctgattaacacagtccagacgttattcagggaaagtgctcaatcttctggaagccaggacatttttaatctgaaaacggcttttgagttttctcagcttagctatgcggcctatctgtttcatgggaatagtgaagatgaagatagagtgcgaactcctcaggcagtgcaatcactacctcttggacgatatgagctgtcgctgcaagattttcattttgtcgaaaccattcccagaattcggcatggggaacgctgggtagaacatcccgaacagcatttcgatattgaagtgataagtggtacgactgaagcgacggaggctgccagacagcgacttatcccgattattgatgaatggaggcagatttatcatcaagtaaaactgcctgccagagttgacctgccaacggaaattggtgagcctcttgaacaagtcaatcacatggagctgctgcatgaagcatcgcgcttggtgagcgatgtgacacaaagctggttaagaaccagtcgtgatgactacatctatgtgattgtgcgtttgtctggacagatcgtcagtattaccatggcggtagatatcaatgaatttgacgtcgggatcgccggttctctgacaaatccgacctacgtattgcatccgcaggctgagggggcaataagaggagccggcaccgctgcaatcagagcgttggccgattatttgagcgaaaaagggaagcgcacattggtttccagcgtgatcagccagccttcggccatagtgaagaaaaaagttggctttaggtttattgaggaactttgacaatttttggcaagataggaatgatagatctgagcgggtcggtaacaggttaataccctgagctttttatccgcttacttgatttttatgtgaaatgtgatttgtgcacaaaaatgaggaattaagataacagttttttaataaattgttgtcattcccataggcaagcgctttcggcacacatataatctgcgaccacttaacagggtcggcgcaaaaattacttgaaagaatctgcctgtaagccaagcggcaacgctaattcagggtggtttccaagtccggtcaatattagaaatcaaatagaggttgtcatgactgtagaacgtactttttccatcatcaaaccaaacgcagtagctaacaacgacatcggtgctatctacgcgcgttttgaaaatgccggcttcaaaattattgctgcaaaaatgctgcacctgaccaaagaacaggctgaaggcttctacgcagaacataaaggccgtcctttcttcgacggtttggttgagttcatgacctctggcccaatcatggttcaggttctggaaggcgaaaatgcggttcagcgcaaccgtgacatcatgggtgcaaccaacccggataacgcgctggcaggtactctgcgcgctgattttgccgatagctttactgctaacgctgttcacggttctgacgccgttgagtctgcacaacgtgaaatcgcttatttcttcggcgaaaacgaaatttttccacgcagctaataggttgatttaagggaggtcagggcaattttcatcggctgacacaataaaaatgcggccatgccctttcaaccgtagaatccatgccttaaaattcgtacaatgccgcgccccggatgagccagctctaccggggcatttttattatttatccatcgccgtttctttaagtgccacccggtttaaagcacagcgccgcaaagtgtaacaacgaggccacgacaactcatgtctgaacaacagttatctgcaacaattcaacccgatgcttctcctgctgccgacagcgcagtgcaggtagcagcgccggccaccgccaaaatcaacctgctcgatttgaatcgtcagcaaatgcgcgagtttttcgctgaaatgggtgaaaaaccattccgggcagatcaggtcatgaagtggatgtatcactattgctacgatgatttcgagcaaatgaccgacattaataaagtgctgagagcaaaattacagcgcgtggctgaaattcgggcgccggaagtggcagaagaacaacgctcagcggatggcaccattaagtgggcgatcaaagttggcgaccagcaggttgaaaccgtgtatatccctgaagccgatcgcgccactttatgcgtgtcttctcaggttggttgtgctctggaatgtaaattctgctcaaccgctcagcagggtttcaaccgtaaccttcgtgtttccgaaattatcggtcaggtatggcgtgcggccaaaattatcggttcgctgaaatcaaccggcactcgcccgatcaccaacgtcgttatgatgggaatgggcgagccgttgctgaacctgaataacgtggttccggcgatggacatcatgatggatgacttcggttttggtttgtctaaacgtcgcgtaaccctgtctacttcaggtgttgttccggcgctggataaattgggcgatatgattgatgtggcgctggccatttctctgcatgcgccaaccgatgatattcgtgatgaaatcgtaccaatcaatcgtaaatataatatcgaaactttcctcgcggcggttcgtcgctatttagcgaaatcgaacgccaacggcgggcgggtaacggttgagtacgttatgctggatcacattaatgacagcaccgaacaggctcatcagttggcagagtgtttgaaggacacgccgtgtaagattaacctgattccatggaaccccttcccaggcgcgccttatggccgtagctccaatagccgggtagatcgtttctccaaggtattgatggaatacggatttacgactattgttcgtaaaacccgcggcgatgacattgatgcagcctgcggccaattggcgggcgaggtgattgaccgtaccaagcgcacgctgaaaaagaaaatggccggggaacctatagcggttaagacagtctgaaccttacggggcgtttagctccgtttaactgactgttatttaagttttaatctgcaagatgtcaggtgttacgcgtaggtaatacagcaaatatgagggcctgatgcgtcgtcaattattcaggttcttgccattacgcaactggacaattggaagagcatgaagctgaatatactgtggggagcatgtttggcggccgtggttttggccggatgttcggggtcatctccgaataaggttgaccagccggcggcaggtcaaacgcgtttacagcttggtttagcctatctggcgcagggagatttacccgctgcccgtcagaatctggaaaaagccgtgaatgccgctccgcaggattatcaagctcagttgggcatggctttatacgaacagcgcgtcggtgaaaacagcgccgcagaacagcgttatcagcaagcgatgcagctcgctccaggaaatggcaccgtactgaataattacggtgcgtttctgtgtggtttagggcagtatgtatcggctcaacagcagtttagcgctgcggctttgttacctgattacggtcaagttgcagatagtctggaaaatgcaggttattgttttttgcgggctaatcaaaatgaccaggccaaagtgttgctccgccgagcgttgaagtatgatcctgataaaggtgggtcgctgcttgcagaggccgaaaggcaatttggagaagggaaacgcgctcaggcgcaactactactggatgtttatcaacatgttcttccggccagtgccgaaagtttatggttacaaattcgtttcgccgcgctggcaggtcgccaggatagcgttcaacgctatggcaagcagcttgcgcgaagttttccacaatccaaacagtaccagcactttctagctaatgaatactgaagcctcccaagatcaaactgttccagagacgacaggtgtgcgcctgcgtcaagcccgtgaagcattagggctaacccaacagaatgttgccgaacgtctgtgcctgaaagtatcgactattcgggatattgaggaagataacgctcaggcgaatcttgcttcgacgtttttgcgtggttacattcgctcatacgccaaactggttcgtctgcctgaagatgagctattgcctatgctggcaaaacaggcaccgattagagcggcgaaagtcgccccgatgcagagtttttcattgggtaaaaagcgcaagaaacgtgatggctggttgatgatgttcacctggctcattgtttttgttgtgattggtctgaccggtacctggtggtggcaaaatcatcaggcccaacaggcagagatcgccaatatggccgatcagtcttctgcccagttatcgcaaaatgaggggcaaacagtccctctggctgatcaaaacgataacgcggaaaaaaccgaagttccgttgtctgacgctaatgcgtcagctgcgccttcggcaccggaaaccgctccggtaacagctccagccgcggcagggaatgccccggtagccacaggtgaaacgccggcctcgtcagcggtagtttcgccaagtcaggcgactttgcctgaagtgtcaaaccctgccattcctttgccgacggcagaggctgcagttaacgctgccgctgcccaatcggccgggttggtgatgaatttctctgacgattgctggctgcaggttgttgatgcaacgggtaaatcattgttcagcggtattcagaagaagggcgcgaccctgaatttatctggcaaagcaccctataaactgacgataggtgcgccaggggcggtcaccattttgtatcaaggtaaccctgttgatttaagcaagtttgttaaatcaagccgtgttgcccgtttgaccgtcggcgctgagtgatcttgtggttataagtgactacatgactgcaaaggagagcgtgtaatgcataatgaatccccaatcattcgacgtaaatccacgcgtatttacgttggaaaggtgccgattggtgatggagcgccgattgctgtgcaatcgatgaccaacactcgcaccacagacgttgacgcgactgttaaacaaattcaggcattagagcgtgttggcgttgacatcgtccgtgtttcggttccgacgatggatgcggctgaagctttcaagttgattaagcagcgcgccaatgttccattggtcgccgatatccattttgactaccgtattgcgctgaaagtagcggaatacggcgtggattgcctgcgtatcaaccctggcaatattggtaacgaatcacgtatccgtgaagtggttgcctgtgcgcgcgacaagaacatccctatccgtatcggtattaacggcggctcgttggaaaaggacattcaggaaaagtatggcgaacccacgccagaagccctgcttgaatccgcaatgcgtcacgttgatatcctcgatcgcctcaacttcgaccagtttaaagtcagcgtgaaagcctctgatgttttcctggcggtaaactcataccgtttattggcaaaacaaatcaataatccgctgcatctggggattactgaagccggcggcgcgcgtagcggttcagttaaatcggctattggcctcggtttgctgctatctgaaggcatcggtgacacgctgcgtatttctctggccgccgatccggtggaagaagttaaagttggctttgatattctgaagtctctgcgcatccgttcccgtggtatcaatttcatcgcttgcccaacttgctcacgtcaggaatttgacgtgatcggtacggtaaatgcgctggaagaacggctggaagatctgattacgccaatggatgtctctatcattggttgtgtggtgaacggcccgggagaggctttggtttcaactatcggcgtgaccggcgcgcataataaaagcggcttctacgaagacggcgtacgccagcgggaacgttttgacaacaagttgatgatcgaccagttggaagccaaaattcgcgccaaagcagcgatgcttgatgagaaaaaccggattgatatcaaccagctggaagatcaggcgccggtctgatccggcggttgtgtccagcgttgagtaagcgggcttggcccgctttatattgtgcccatagtggtgatgagcgtccccattgaatcacgggacggctagcccctataatcggctttatttttgcatcaaaactatagagaaaagacgtggcaaagaacattcaagccatccgtggtatgaacgactacctgccggctgatacagctttatggcagcgtattgaaggcacattgaaacaagtgctgggcggctacggttacagtgaaattcgcttaccgattgtagagcagaccccgttatttaaacgcgccatcggtgaagtgaccgacgtcgtggaaaaagaaatgtacacctttgacgatcgcaatggcgaaagtctgacgctgcgcccggaaggcacggcgggttgtgtacgcgccgggatcgaacatggtctgctgtacaatcaggaacaacgtttgtggtacatcggcccgatgttccgctacgagcgcccacaaaaaggccgctatcgccaattctatcagttgggtgccgaagtctttggtctgcaagggccggatatcgatgccgaattgattttgctaaccgcacgttggtggaaagcgctgggtatctccgagcacgttcgtcttgagcttaactctattggttcattggacgcacgtgccgattaccgcgaagctttggtcgccttcctggaacagcatcaggaagtgttggatgaagactgcaaacgccggatgtatagcaatccgctgcgtgttttggactcaaaaaatccagaagtccagcagttgctgaacgatgcgccgcgtctttctgaatatctggatgaagaatccaaacagcattttgccggattgtgtgaacttttggatcatgccggtatcccatatagcgttaacgagcgtttggttcgcggcctggattattacaaccgtaccgttttcgaatggataaccaatagccttggttctcaagggacagtctgtgccggcggccgttacgatggtctggtagagcaactgggtggccgagcgacgccagccgtcggttttgctatggggctggagcgtttggttttgctggttcaggcggttaatcctgaattttgcgtaccgccaacggttgatgtgtatttggtgtcttccggtcaggggacacagagcgcagcaatgcagctggctgaaactctgcgtgacgctttgccgtcattgaagctgatgaccaactatggcggcggcaactttaaaaaacaattcgcccgtgccgataaatggggcgcgcgcgtggccttggtgttaggtgaagacgaagtgtctgcacagcaggtagtagtgaaagatctgcgcaagggtgaacaagaaacgctggcgcaagctgatgtagctgcgcgtctggcttcgatgttaggttaaggagagagacaccgtggaagtctataccactgaaaatgaccaggttgacgcagtgcgccgtttctttagtgaaaacggaaaagcgctggccgtgggtgtggtgctcggaattggtgctttggtgggctggcgttattggcagagccatcagaataccgcgctgacggaagcatcttcttccttccagaaagccagtgcggcattggcagccaacaacgctgaaggcgttaccgctgcggaaaaatttgtacaaagcaacagcaacaactatggcgtgttggccgggttggaactggcgcatcactttgtggcacaagggcaatttgataaggctgctcagcagttgagtctggctcagggcaataccaaagatgaaaacctgctgtcgttgatcaacctgcgtttggcgcgtgtccagctgcaattgaaaaagccggaagatgcattgaaaaccctcgatgcggtgaaaggcgatggttggactgcaatggcgcaagacgtgcgtggcgatgcattattaagtaagggcgacgttgctggtgcacgcgcagcttacaccaaaggcgtcgaatctaatgcttctcaggcgttgcaggcattgctgcgcatgaaattgaacaatttgtccagctaaggggaattcccatgcaactgcgtaaaacactcttagtaggactggtttccgtcgccctattgagcggctgctcactgtttaacagtgaagaagatgtggtgaccatgtcgccactgccaacggttgaaaatcagttcactccgaccaaggtgtggagcacttctgttggcagcggtgtgggtgattactactcccatctgcgcccgacctggcagggttcttctgttttcgccgctgatcgtaaaggtctggtgaaagcgatggatatcgatactggtaaacaaatctggcaaaccgatctgtctgaaaaaaccaatttctactccagcaacagatcagccatgctttccggcggtctgactgtttctggttctcacgtgtttgtgggtagcgaaaaagcggtggtctacgcgctgaatgccgacgatggtaaagtagcgtggcagaccagcgtggctggcgaagcgatgtcgcgtccggttgtcagcgacggcgtggttctgattcacactaccaacggtatgttgcaggcgttgaatgagagcgatggcgcgattaaatggacgctgaatctggatgtgccttctctgtccctgcgcggtgaatctgcaccgaccgttgcctttggcgcggctattgttggcggtgataatggtcgcgttagtgcggtcatgatggaacaaggccagctgatttggcagcaacgtatttctcaggtaaccggtactaccgaaattgaccgtctgaacgatgttgatatgacgccaatcgtggtagacggcgtggtttatgcgctggcttacaatggtaacctgaccgcattggatctgcgttctggtcagattctgtggaaacgcgagttgggttcggtcaacgatttcatcgttgattctggtcgcattttcctggttgaccaaaatgaccgcattgtggcactgaaatccgacggtggtattaccctttggagccaaagcgatctattgcatcgtaacttgactgccccagttatgtataatggctatctggtggttggtgatgccgaaggttatctgcactgggtgaataccgaagacggccgttttgttgcgcagcagaaagtggatagctccggcttccttagcgcgccggtggttgtcagcgataagctgatgattcaggccaaaggcggcacggtctacgcgtttactcgctaattatcgggtaatacactggacgaaagctaaactttcaagggtgtgattaccgaacacattggctcttaatatgagtccctaaacggctcctgaatagttcaggggccgtttcgtattctataaactccgctgtccgtgttgttcgatagcgttgtaacgaattgaaaaataagtaatgaggcttcaataatgatacctgtcatcgccctggttgggcgcccgaatgtgggtaaatccactttatttaaccgtttgactcacactcgggatgcgttagtggcggatttccccgggctgacgcgtgaccgtaaatatggtcgtgccgaagttgagggtcatgagtttattgttatcgataccggcggtattgatggcaccgaagatggcgttgaaacacgcatggctggacagtcgctgttagcgattgaagaagcagacatcgtattattcatggttgatgcgcgcgctggcctgatgcctgcggatcagggcattgcccagcatctgcgtagccgccaaaaagccactttcctggttgctaacaaaaccgacggcatggagcctgaagcggccgccgccgatttctactctttgggaatgggagacgttcacccaattgccgcttcgcacggtcgtggcgtagctcagctgattgaagaagtcatggctccgtatatggcgccggtagaacctgaagttgaattgactgaagaagaagccaacgccgcctattgggcagaactggaagcgcaggatcaagatcaggcagaaggggaagaaccagaagaagacgatttcaacccgctggatttgccgatcaagctggccatagttgggcgtcctaacgtaggtaagtctacactgaccaaccgcattctcggtgaagagcgtgtggtggtgtacgacatgccgggcaccactcgcgacagtatttatatcccaatgacccgcgacgatcgtgaatatatcctgatcgacaccgccggtgtgcgtaaacgtgggaaaatcactgaaaccgttgagaaattctcggtaatcaagaccctgcaagcgatcgaagactcgaacgttgtattgctggtgattgatgctcgcgaaggtatctccgaccaggatttgtctctgttgggcttcatcctcaatagtgggcgctcacttgttatcgccgtcaataaatgggatggcatgagcgaagaagctcgcgctcaagtgaaagacatgctggacctgcgtttgggcttcgttgatttcgcacgtattcactttatctctgctctgcacggcagcggcgtaggtaatctgtttgaatccattcaggaagcttacgattgctctaccaaacgtgttggtacctcaatgctgacgcgtatcatgcaaatggctgaagaagatcatcagccgccgctagtacgtggtcgccgtgtgaaactgaaatacgcccacgccggtggttataatccacccatcgtggttattcacggtaatcaggtgactgatttgtccgattcctataaacgctacctgatgaactatttccgtcgttcattgaaagtgatggggacgccgatccgtattcagtttaaagagggtgaaaacccgtttgctggcaagcgtaacaccttgacaccaaaccagatgcggaagcgtaaacgcttgttgtcacatctgaaaaagaaataaagtaagctagcagggcgcggatattccgcgcccttcgtgtttctggctaatggctaaaagtattgtttacgaaatgagtttgggaagacgttatgtcatgggaaacttggagttttgcgtttagcgtaacagtaccgaatttattgatgatgttacttggcgtcatgttgcgacgctggcgtctgatggacgacagtttctgcgacggtgccacccgtctggttttcaatctcgctttgccttgcctgctattctttagcgttgccactaatcacgttagtctggccgatcatctaccattagtgatttacggtgcagtcggcacgttgattaccttttcgctgctggaagtggccgctcactggctggttaaagagcctcgtgagcgcggtgtattcgtgcagggcggctttcgtgccaataccgccatagtggggttggcctacgcgatgaccgcttacggtgatgaaggaatggcgctgggggcgatgtatctgacggtcacggtaatattattcaacgttctgtcggtgatcacgttaactcgcagtctgaacgcggccaccgacggaaaaatcagccagagcgccttattgaaaagtattgtgactaacccgctaattatcggtctggtttgcggcttactctatgctcaaacccacctgccgatgccgcaggttattcagcaaaccggtggttttatttccgctctggcactgccgctggccttgctttgcaccggagccagcctggactggaaggcgatgtttcgttcttctaacgtggcggctttggcatcctccgccaaactgatttttgtacctttaatcatgacattaggcggatggttgctgggttttcgcggtgctgcactgggaattatcttcctgttttcagcgacgccaacggcggcgggcagttatgtgatgacgcgagcaatgggcggaaatgccactttagcggctaatattatcgccattactaccgtgggatcgttctttactacggccttgggtatttatttcctgcgtacattcggcgtgatttaaggagaaaataatggaagctctatgtccggtgtgtcatacagcgatggatgaggtaagtagtcactttcactgtgctacatgcagtagcgactatcagccgcaagcgatttgcccagattgcgaaaagccgttacaggtgcttaaggcctgcggcgcagttgattatttttgtcagcacgggcatggtttgatttcgaaaaaacgcgtgaaatacgagtataccctgcatctttaacgccgcagcgagttgtcaattgtcttactgacacactggatagcatcgtacctggtgacgataaaaactgagctatttcgccgccgttcgcggcttacgtgcttttttcaccggcgttagctgcgtaatttcactttccacccaaccatcctgcagccgggttttcagcgtatcacccacctgtacttgctgagtggtttttagcagactgccgctgggggtttgggtcacgctatagccgcgtgccagtgtagccagtgggctaacggtttctaactgagaacaggcaatcccaaaacgttgacgataagcgtttagctggcgctctagcgcctgtttcagacgatattcctgctgctgcacttgttgactgtaacgatggatacgtccctgcggctggacgtgactcagccgttgttgcaaacgctcaacccggcgaacttgcaggcgaatttggttttgagcgcattcttccaaccgacgttgcagtttaaacaacaacgtttgctggcgcgccaaacgcaaatgaggatgctgttgctgtaagcggtgatgcagttgggtaaattgttgattacgctgcgccagataataatccatcgccatttccatgcgctgttgctgcgcttgaatctgacgcactaattccagctgattgcggctaacaatttcagcggcagcagaaggcgtcggtgctctcagatcggcaacaaaatcggcgatagtcacatcggtttcatgcccgacggcgctgacaatcggaatccggctggcaaatattgctcgcgccacccgttcatcgttaaaactccataaatcttccagcgaaccgccaccacgccccacaatcaagacatcacactcagcgcgccgattggccatttcaatcgcgcggacgatttgcattggcgcttcggcaccctgaaccaaagtaggataaatcaccaccggcagcgaaggatcgcggcgctgaagcacctgtagcacatcgtgcagagccgctccgctggcggaagtaatcacgccgacccgtttggctggggcagggagcggctgtttgtgcgccgcttcaaataatccttccgctgccaattgtgctttcaattgctcaaactgctgttgcagcaaaccatcgccggcaggctgcatactttcagcgattaactgatagtcacctcggggttcatacagagtgattgaggctctgaccagcaccatctgaccattttgcgggttaaaagtggtgcggcgattgctattgcgaaacatcgcgcagcgtacctgcgcccgatcgtctttcaaggtaaaataccagtgaccggaggcgggcttggaaaagttggatatctcggcggtgagccaaatctggcccatttccatttccaacagctgtcgaaccgtctgattcaggcggctgacggtaaatatcgaggtggcggaagttagtggcatgtgacctggatcaaattttaaaacaagtacttaattgatcgatattacctgcctcagaacggtaagcaagaaaatttatcagaaagtgctggaggcaaccgattacgctctgtataatgccacggcaatattttatcttttctcaaatcactctggtgagatattgcccatgctacgtatcacgaaagaagcactaacctttgacgacgttctcctggttccagcccattccacagttctgcctaacactgcggatcttggtactcaactgaccgcaactatccgcctgaatatccctatgctgtccgcagccatggataccgtaaccgaatctcgcctggccattgctctggcgcaagaaggcggtctgggcttcatccataaaaacatgtctatcgagcgtcaggccgaagaagtcagccgcgtgaaaaaacatgaaagcggcgtggttactgaaccacagaccgttacgccaaccaccactttgcgtcaggttaaagaactgaccgcccgtaacggctttgctggctatccggttgtgaccgaagattacgaactggtgggtatcattactggccgtgacgtacgctttgtcaccgatctggaacagcctgtaacggcggttatgacgccgaaagagcgtctggttaccgtaaaagaaggcgaatctcgcgaaattgtgttgcagaaaatgcacgaaaaacgcgttgaaaaagcgttggtagttgatgataacttccatctacgcggcatgatcaccgtaaaagacttccaaaaagcagaacgtaagcctaacgcctgtaaagacgaacacggccgtttacgcgttggcgctgccgttggcgccggagcaggtaacgaagagcgtatcgacgcactggttgccgctggcgttgacgttttgctgatcgactcatctcatggtcattccgaaggcgttctgcaacgcattcgcgaaactcgcgctaaatatcctgatctgcaaattgttggcggtaacgtcgctacaggcgcaggcgcaagagcattggcagaagccggtgttagcgcggtaaaagtggggattggccccggctctatctgtactacccgtatcgttaccggcgtgggtgttccgcaaatcacagcggtatctgatgccgtagccgcgctggaaggcaccggtattccggttatcgccgatggcggtattcgcttctccggtgatattgcgaaagcgattgcagcgggcgcgtcctgcgtgatggtgggttctatgctggcaggtactgaagaatctccgggtgaaatcgaactgtatcaaggccgttcattcaaatcctatcgcggtatggggtctttgggcgcgatgtccaaaggttcttccgaccgttatttccagactgataacgccgcagacaaactggtaccggaaggtatcgaaggccgcgtagcgtacaaaggtctgctgaaagaaatcgttcaccaacaaatgggcggtttgcgctcttgtatgggtctgaccggttgcccgaccattgacgatctgcgtaccaaagcagaattcgtacgcatcagtggtgcgggtattcaggaaagtcatgtgcacgatgtgactatcacgaaagaatcaccgaactaccgcatgggctaattccaagagctgcggtcggtgagttttgtcatcgtccgctgctcgcattgctcaatgactttgcgtcaattgcgtatgtgatgctgcgggcgttaactcactttctggcttcgccgattggaataggacgtttattaacgttgctgaagtctttcatttttattttatttattgacctgtttctggaatacgcctcacatgacaaaaaatatccataagcatcgcatccttattctcgatttcggttcgcaatacactcagctagtggcgcgtcgcgttcgtgagattggcgtttactgtgaactatgggcgtgggacgtaactgaagcccagattcgtgagtttaatccgagtggcatcatcctgtccggcggcccggaaagcaccactgaaaacggcagtccgcgtgctccagacttcgtgttcaacgcaggcgtaccggtattgggcgtgtgctacggtatgcaaaccatggcgatgcaactggggggccacgttgaaggttctaccgagcgcgagttcggctatgcgcaggtagagatcaaaactgattctgcgctggttcgtgatattaaagatgctctgaacgcggccggtgagccaattctggatgtgtggatgagccacggcgataaagtgacggcaattccgtctgactttgtcaccgttgctagcaccgatacctgcccgtttgccattatggccaacgaagaaaaacgcttctatggcgtacagttccacccggaagtcacccacaccaaacaaggccaacgcctgttagagcgcttcgtattggatatttgccagtgtgaagcgctgtggacgcctgcgaccatcatcgaagatgcagtagcacgtctgcgcgaacaaattggcgaagatcacgtgattctgggcctctctggcggtgtagattcttccgttaccgctatgttgctgcaccgtgccatcggtaagcgtctgacctgtgtattcgtggataacggcttattgcgtttgaacgaagccgatcaggtgctggaaatgttcggtgataaattcggtctgaatattgtccacgttgcggcggaagatcgtttcctgagcgcactggccggtattgatgagcctgaagccaaacgtaaaaccattggccgcgtatttgtggaagtcttcgatgaagaagcttgtaagcaagagcaggtcaaatggttggcacaaggcaccatttatccggatgtgattgagtctgcggcctctgccaccggtaaagcgcacgttatcaagtcacaccataacgtgggcggtttgccgaaagaaatgaagctgggtctggttgagccgctgaaagaactgttcaaagatgaagtgcgtaaaattggtctggaattgggtctgccgtatgacatgctgtatcgtcatccgttccctggtccaggtttaggcgtgcgcgtactgggcgaagtgaagaaagagtattgtgacctgctgcgtcgcgctgatgcgatctttattgaagagctgcataaagccgatctttacaataaagtcagccaggcgttcaccgtattcctgccggttcgttccgtaggtgtcatgggcgatggtcgtaaatatgattgggtggtttctctgcgtgcagtcgaaactatcgatttcatgaccgcgcattgggcacatctgccctatgatttccttggccgtgtatctaaccgcattatcaatgaagtcaacggtatttctcgcgtggtgtatgacatcagcggcaaaccaccggcaaccattgagtgggaataacagcccgaaataaataattttcgataaaaatccaacccccgtatatttcgggggtttttcatttatttcatttaattaattttgttaaatgaaataagatgtttattgttattttgtttttatattctacttctcacaattaatatttactcgtgatacggacttaatatattgaatctgtttattgaattgatataggtctggctatactctgagcggttagctacgcttggatgctattttgtatttcttgtatttcttgtatttcttgtatttcttgtatttcttgtatttcttgtatttcttgtatttcttgtatttcttgtatttcttgtatttcttgtatttcttgtatttcttgtgtctttaaccttggttttttatatccccatattgtctaggctgtttttttgaatgagggtaagctatgttattatgagaataataactaaagcatgtgataaaaaagaatgtttcagtatttttacttacgtcgagtttccagtatttcctgatgttgaaataattaaatttattcgattcgagtatcggttgtcatcaataccaatgggcgctctgatattaactatgctgcaaggtctatagttattcgtaaggatataaatgagttaagcctgcacgatttacaggagcgtataagcgctaagaatagttgcctgaacccactgataataccgataatacaatcgattttaaccatgctgttggaggggctaaacactatcttcattactatggtaataaagaaaataaagatggaaatggttttattgctgaaggtttacctaaaagaataaaaaggattgggttcatataatatattgtaccgatgcaggcaggtgatgacggaatgtgttgatgaatgtaaatggtgacatatgtaatctcatatactcataattatcgtcgtttaccctcagcgccgtggatgatcgatccggcacctgcacctgaaataatggaagctgctccccacatcatttattacatgatgggatttgcaccacgagagatattcgtaacttcttattaataagtatgagggatatgctggtagtcaataaataatgtcattgtcttaaacacacaatattgttttaaaattaataatgctgtcgttttactttatgttacccgttggggttgaacactatcgccttgacgaatatttacctatcaactaaatgtttaagttatagaacaccataatttacatcgctaacaggcgagataattattttttcacaacagaacttttcacctcagcgagctgagaaatacgctgcggtttagccaaacagtcacccgcatcgctgaatcaaatcgatgattactgtagggcgtacttagtgttttgtggagagaaaacatgtcgttacatcccccatctatacctcgcgttaacggcgtatcccgtcggcgtttattgggatatgtcggcgttgggttagtcgccagcttgatgagtccgctgtccctgaatgtttttgctgcttcaacctcaacgatgccgctcaatctggagcgatttatgctggtttcgcgtgctttgaccggtaagcgtcaacttaatccccatatcggccagcggatctatcaggtacttattctgcgcctgccgcagctcgatcaacagctggctttactccaaccgcttccggctggtgagccacaaaattggtcgcaggcacagcagggcattgcccggcaggtcttgcaggcgtggtatgtgggcgtgataggggaaggctcgaatgcggcggtgattagctacgagaatgcgctgatgtttgaggccgtgtctgatgttttagtcattcgctcctattgtcctaaccaacccggttattgggctgccaagcctgacgtggccatataattcaggagaatacttttatggctgatactttgcaggctgacgtgattgttatcgggtccggcgtagcgggagggcttgtcgcgcatcagctggcgctagcggggaaatcggtattgatactagaagcggggccgcgcttaccgcgttgggagatagtggagaacttccgcaatcagccggataaatcagacaacatggccgcttatccttctactccttacgcacctcatcccgaatttaatcctgataatcactacttgattcaaaaaggggaacacccttacgacgtacaatatatccgtgctgttggcgggacaacctggcactgggccgcttcggcctggcgttttttaccgaatgatttcaaattaaaaacgctgtatggcgtgggattagattggcccatcgactataccgcgctggaaaaatggtatttccgtgctgagcaggaactgggcgtttgggggccgaacaatgaagatttgggatcgccccgcgcgcagccttatccgatggaaccattgccgctttcatggaacgagcagcgaattaaaaccgtattaaatgcgaatggattttatgttgtaaccgagccggtggcgcgaaatagtcgtccgtatgatggcaggccgacctgctgcggtaacaataactgtatgccgatttgccccattggcgcgatgtataacgggattactcacgttgaaaaagccgaacgagcgggggcaattgttcgtccgcaggcggttgtttataagctggaagtgaacgatcggcaggaaattgctgcagccttgtttaaagacgctcagggcggggaacatcgggctgaagggaaattctttgtattggctgcgaatggcatagaaattccgaaaataatgctgatgtccgtcagtgaaaaaaatcctcgcggagtgggcaatagttcagaccgtgtgggacgaaatctgatggaccatccgggtattggcgtgactttcctggctaatgaagcgctgtggccggggcgtggtccgcaggaaatgacgtcaatggtggggttccgcgatggcgctttccgtgctgagtatgcggccaaaaagattcatttatcgaatttatctcgtacggacgaagtgacaatcaatttgctcaagcagggggatttacagctagggccgcagttggaggcaaaaatccgcgaccgggcggctcgctacgtgcgttttgacagttttcacgaaattttgcctcatatggaaaaccgcattattcccagcctaacggaaaaagacgccatcggcatacctaaacccgagttttattacgccatggatgactatgtgcgcaaaagtgcattgcatacccagcaggtctatgctgatgcggcgcggctaatgggcggaaccgaagtggtattccataatgatttcgccaacaacaatcacattactggcaccactattatggggaacgacccaaaagactcggtggtggatagtgattgccgtactcacgatcataaaaacctgtttatcgccagtagcagcgtgatgcctaccgtgggatcggttaactgtacgctgactatcgctgcgctctctttacgcattgccgaaacgttaaaggccgaggtgtgatatgaaaaagcaaactctggtctggctggcgttatgcggtgcctttagcgcgacggtgcaaggagcggaaggtacggatctgattaaacgaggggaatatctgactcaggcggcagactgcgtagcctgccataccaccaaagggggaaagccttttgccggaggattagcctttaaaacgccgatgggaaccttatattcaccgaatattacgccggataaagcgacgggtattggggagtggaatgacgaagagtttattcgggcgctgcatgagggaaaagggaaagatggtgagaatctctatcccgctttcccttacacttcatacactttactaacggatgatgacgttagggcgataaaagcctatctgtttagcctgcctgcggtacatcagccaaatcgtgaaaacgatatgccattcccgttcaatcagcgttggggactgtggttttggaattgggtgaattttgaagggcagcgtttccagcctgataataatcaaagcgccgagtggaatcgcggtgcctactttgtcgaggcgctggggcactgcggggaatgccatacgccgcgcaatttcaccatgggaatgaaagacagcaaagcctacggtggcgctgaaattaatggctggacggcatttaatattacttccgatcctaatgcggggattggcagttggagccaggagcagttggttcaatacctgcgcagcggccatgttgacgggaaagcgcaggcagccggaccaatggccgaagtgattgaaaacagtacccgtcacctgacagagagcgaccttaacgcgatggcggtttatttacgaactttgaaaccgctgaatctcgatgatgaaaccaagagccgctcagactgggggcaaccggcaaccggcgtcgattcgctacgcggcaaggcgtttagcgccgatgattacactgatggcgcgcggctgtatttggggaactgtgctagttgccacagttttaccggcgcgggagttaaggacggttattatccttctctgatgagaaactcagtggttggagccacgacgccgaataatatggtcaaagtgattttgcacggggtgactcgccagactaacgacggtgaagtgttcatgccgggttttgccaacaccctaagtgatgaacaagttgcgactctcagtaactatttgctgcaacagtttggtcagccgacgttgaacatcaaagccgacgatgtgaaagcattacgcgaaaactagcctgagcatagggtaatctgacgcgaaaggagcgaagcgtccgattacccattgccgaaatgatttttagctcggttttacccaatgcatcaaaatatattcgccatcttctcctttgccggtggcgattttctgccagccattttgctgataaaacgccagcgctcgctggttgcggactagacactttaacaccccggtagcggtcaattccctctgtaccgcctgtagcagtaattttcccacgccaagaccctggctgctcggatcgacaaacaggttatgcagaaagttttcctcccgaaaaaccgaagcaaagcccagccggttaccgtcctctaccgccaccaaaatcttttctcccaataccgctttatcgaagtcttccagtcggaaattttcctgattaatccagctaaaggcagcctgacgggaagccagatacagcgttcgtaaaaagggacgatcggcttcctgatattcacgaatgttcattttatccccctgagtagcgacttatcacccttgagccagagttgatcttatcttatcaaccgctgataatggtcgttctgactcggggtgccgcgctaactcactgtgtggctgagattttacccgtattacctgatctggattatgccagcgtagggaagtctcggcatcctctgggtaccgccttcttgaccgccggttgggaggaatatgtaccttcgacctaccgttttactcgcttctgctatcacagcttatctgttgtctccatcgatcgtcttttccgtggagatatgccaatgaaacgtctcaatgcattaaccatagccggaactgaccctagcggcggcgcgggtattcaggctgatttaaaaaccttttctgctttgggtgcttacggaaccagcgtggtaacggctttagtggcgcagaatacgcgaggcgtgcagtcggtttatgcgatagaccccgcatttgtggccgctcaattggattcagtcctgagcgatgtacgtattgatagcgccaaattgggtatgttggccaatgaaaatatcgttcagatagtggcagaaaagttacggcaatacccactggatttcgtggtattggataccgtgatgctggccaaaagtggcgacccgctgttagagcctgcggcggtggcggcgctgcgtcagcaattgttgccgctggtttccctgattacgccaaacctgccggaagcggcggcgttgttggattgtcagcctgcgactaatgaatgggaaatgtgcgctcaagggcgggaattactggctatgggctgtcagggcgtattgatgaaaggcggacatttgaccggtggggatagccccgattggctgtttacggctaatggcgagttccgtttctgtttaccccgcattgccactcgccacacgcacggcactggctgcacgctgtcggcggcgttggcggcgctacgaccaacacaggaaaactgggcgacaacggtctccgctgctaaatcttatctgcaaggcgcgttggagcaggcggatacgctggaggttgggcaaggaatcgggccggttcaccacttttatcgttggtggtagcccagccagactggcgctcagtttattcggcgatcaggaatgggcgggtgagagcgaacagcgccagcgcccgctgtaagtgaacggcgtcaaaaggattcagaataaagtgctctgcgcctttacgtgggcgaatgcagggtaataggctgatattaccctgctgatcttttttctgatcaaatacatagctgccgatgtcatgttcgttttctcgccatgaaatcatcaccgccgcgtgaggatgtttatcactttttggccgtatagcgaaaaaataatctccggcccagaacccgccgaactcgccgtcaatctgtcggtttttactgcagaacaccgcggaatcagcaacctggtcgatggctttcggcgtaatttcctgatgaagccgctgccacagcggacgaccattttccaactgccagcaggcttcaccgagataatcgttcagatcgcgccagtcttgctctaactgctggatcaaggctttatccagaatattgcggtattgctgcatgccgttaagctcgccttccagcgcctcgtaggtaatcaattccatcgtccgcgggcggcggcggaaggtcatccagagcaccattttaggaatacggaattcgatagactgcacgctcagccgatgcctattgcctttattcagcacaaaaccgttcgcggtgccgcgtttattctgatagttacgtaccaccatcacgctgtttagtcccatccagccggtgacgtagtgttcgtcctctgagttggcgacatccagatcgaccaccatttgtagaatcttgtcggtggtgactgtctttagcgccggagcatccgtcgcagaataatacaatttgggtatgttttgagaaaattcgaggctaggcatagaggcagatcttcttggtcaataatctggttcatagcttaactcaagttgtcataccgattgttgaataactgaatttagcgtggaaattcgtgctggggatcaactttttcctgcgtcgcgggtcttatgaactgaataacagggcggtgaaaccactgttgaatatcaaatgacataaaaaggattgcgataatgaaaggacagaaaaccctccattgtcttttactggggacgttattgagcgtgagttcatggagttttgcccagcaaacgttgaccacggcagagttagttcagcagccgcagtataaaagcagctggcaaaaaatgattaaaggacagaagaatttgcctgcctgggcgcgtaaaggtgccggaacctctgcgccaccagaatgggccgagtgggaaggtaaaaaatatcaggttggtaatatttgtaagcctcacgattgcgccagccatttcttgctggtggctttcagcgaggataaaaagcgggcttggggcgtgcggattagcgtagaagataagccagaagccctggaaacgccgagtcaatttgccacataccaatggttaggccagccggatgaaagaatgaaaaacttattgatggcgcagctcgagaaagatcccaactggaaataaacgccctttctgacgcggaaaaataaaacggcgcatttagcgccgttttgtttagcttcgctctattgaactgactatttctgcagtgaatggataaataagcgataccattcgctattgacggttggcagcgtgatttcaacccgttctaaccgcttcagcgtctggctgctatcgtaatcgatggttgtttcctgcaaagattgatagaagttatccaattcctcatcgctggacgtcatcatgtcctgaatcagtggggtgataggtaaaatctccccttgttgatagcgacgatgcgcctcgcggagccactgacgatgggaaaccacggtcatcggctgtggcaaatgagcatttaactgctcaataaattcacgtcgagacattccttccatggcggaaaggtggaagatattctccgtcggataatggctagaaccgagatgcgccaaagctttcgcggtgtaatccaccggagtcaactggatatcgccgtagacatcatcgaaggccatgcccatctgaacgctgctcttaaacagacggtaaaatgcctgtagctcgtcatagcgcgccagttctgaatcggcggtaatcaggcccaggcggaaaatattacaggcaatgccacgggcgacggccagattgacgatttcctcgccaacccacttactcgccacatagccttgatctgcaatgtgttgctcatcttgaattgatgactgctcattcaccacgcgatggccttgctgcccaatcgggctgaatacgttcagagtcgacgcgaaattcagaattttgcgacttccctgcgtggtcagacgcagcagttcaaccagacttgcaacgttggctttatacgccatttcaaatgactcaaggtgattcatgcttaccgccgaatggaaaataactcccacgtcctgcgctaagcgttgataaagcaggtcgtcgatacccaaacgcggcgcttttatatctccttgaatagtgatgatgcgttgctcgtcgcctttgcgccacagcgaccattcggtaagaatatttctcaaccgttgcaggctatcctgctggttatgacctcgtaccagacagtaaattttgctgtcggtactatccagtaattctcgcagcaggaaacgccccacaaagcccgtggcaccggtgaggaaaatagcatttccctgattgatagactgcgactgtggctgaatatcttccggtaacaacgcctgttgacgcaggttaatcacgtcgctgacgcgagcttgctgagtgattcggctcgccaattgttttaccgttggcgcaataaagatgtcgctgacgctgaccttatcatcgatagcggcattgatcagattcaccgcgctaaccgccagtaaagagtgcccgcccagctcaaagaagtgatcgtggcgaccgactttttcgctgtccagcaggctttgccagatttcggcaatcgtggtttccagcccggccagcggcgcttcataaggttgatgcaggaaggcattttcctgcggagccggtaaagccttgcgatccagtttaccgtttggcgtgatcggcatactattcagcagcacataggcggcgggaatcatgtaatccggcagacggctttgcaggtagtggcgcaaagccataggctccggcgcaggcgagttggcatcagccaccagataggcgaccagccgcttgctgcctttgttgtcatccagcgccagcactgcggcgtcactgatattggggtgatcgttaagcttagtttcgatttcgcccaattcaatgcggaatccgcgaattttcacctgatgatcgttacggccgtggaactgtagccgtccgtctgcaagatagctggccagatcgccggtgcgatacatgcgagcgccttcaaccgaacggaaaggatcgggcaggaagcgctcggcggtcatttctggtaggttcagataaccgcgagtgacgccaggcccgccgatatacacctcgccaataacgcctctcggcaccagattgccgtggttatccaacagataaatacgaatattcgccgttggacggccaatggaatcaatctggctgatacccaatttaggtgagtgagtggtcgcggtaatggtggtttccgttggcccatagcagttcaccagctcaggtttctcagggtaacgtttgagccagcgctccagcatttccggcgcggcggcttccccgctgatacatatcagccgtagagcgttcggcaacggcccgcggctttcttcgcacagtttgcgccagaactgatacggaatatccagatagctaatgccatattgctcacacagctgccagaaatcgctgctaccagccagccattgatcgtcccgcagcaccaaagtggctccagaggttaacgcggagaatatctcggacactgatacgtcaaaggtggtgttgcagaattgcagtaccttatcctgtgggccaagattccattggcggcaccaggtcaccatttgttgcaccagattgccgtgctcgaccaatacgcctttcggattaccggttgagccagaggtatagatcacgtaggccagattctgtggagccaggctcggctgcggatttacccctgtctcctgtaatggagcgcttactgctggcagtaattcgtgaggaacgccgcagtctttaaacagcggcagtgtcgccggttcagccagaatagctaccggtttggcatcttccagcatgaatttcagtcgttcaggagcaatatcatgtggcagagaaagataagcgccgccggccttcaggatcgccaaaatgccgacgatcatttccgggctgcgatcggcgcagatcgctacccgatcttccgctttgacgccttgttcgatcaatagataagccaggtgattggctcgattatttaattcgccgtaactcaatgaataggcgttattcactaaagctatagcgtccgggctgcgctctgcatgttgctcaaataaatgatggatacacaggtcggcaggataggactgcgccgtctgattccactgttccagcagtaattgcttttctcgatcggcaatcaaatcaatctgaccgatgacctgagcgtcgtttttcaccattgcttccagcaccgcgattaaatattgctggtggcgctgaacagtggcttcatcaaacagggcgctggcgtaattcagcgagccggtgatgattttattgcgttcccctaaactcagctctaaatcgaattttacccgactgaccggtggttcctgcaacttcacgtccaatcccaccatgttaaccgcgatatcgtcgatattttccagagcaaacatcacctggaacagcggagttttatccatgctgcgcggtggttggaggatttctaccacttgctcgaacggcagagcctgatgttcctgcgcgtcgagagtggttttccgcacctgtgccagcagatcggcaacgtttgaggtcgtggatagattgatacgtaacgccagcgtgttgacgaagaagccaatgacgccctcgcattcagcctggttacggttggccactggtgtccctattaccaaatcatcctgaccggacagacgcgacagcacgatcgaccaagcgctgagcagcgtcataaacaaagaagtaccgtgtcggttactcaggcggcgtagctcatcagaaagctcgctgctgagtacgataggcagactggcgccgataaaggattgctgaggcggccgcggccggtcggttggcagcgtcagacgttctggcgcaccggttagcagttgctgccagaatttcccctgttcatgccagaccgggctattgcgccattgctgctgccaaaccgcataatctggatattgaattggcaacggaggcagtgggttagcgcgttgttgtaacagcgccgagtaagtcactcccagctcgcgcaccagaatttccattgaccaaccatcggtaataatatggtgcagcgttaacagcaggatgctctggttgtctcgcaggcgcagccaactggcttgtaccagcgagtccttcgctaaatcgaatattctccgctcttcctggctgtatatttcctctactttttctgcgctatttgcctgttcgcgccaatcatattcaacgaaaggaatacctgactgactatcccgaagtctcaccacaggttcattctgtccggatgaagtaaagttacttcgcaatgattcatgacgtgcatataagatatttagcgtttgctgcaataccgggatattcacatcgccgcttaatgctaacgccatcagcacgttatagttggaatcactgtcgctaagctgggacaagaaccacaggcgctgctgggagaaggacagtggcagcggtttatcccgcgtagccggaacaataatggcagtcagcgttgtatcacctgtttggccttcacggtcgatgacttctgccagttggcttagctgcgggttatcgaacagcgctgccagcggaatgctgatattgagcaattgctgtagctggctaatgacccgaacggccagtagcgaatgcccgcctaactcgaagaaatggtcgtttcgtcctactttttctacgtccagcaacccttgccaaatttctgctaacgtggtttcaatgccagcccgtggtgcttcaaaatcgcgatgaataaaagcgtcttcctgcggagcaggcaaggctttgcgatccagttttccatttggcgtaatcggcatttcgttcaacagaacgtaagccgcaggaaccatatattcgggtaatagcgcggccaaatgattgcgcaatattgcaatatctggacgaggctgttcggtatcggctaccagataggccaccagccgtttgctgcctttaccgtcgtcctgcgccagcactgcggcttctttcacctgcggatgggaattgagctgggtttcaatttcgcccagttcgatacggaaaccacggattttcacctgatgatcattacgcccgtggaattgtacgcgtccatctggcaggtagctggccagatcgccggtacgatacatacgtgcgcctttcaccgtactgaatggatcgggtaggaaacgttcggcggtcatttccggtagattcaaataaccgcgcgtaacgcccggcccaccgatatacagctcgccaatggctccctgcggcagcggatcaccgtgcggatcgagcacatagagccggttattggcaatagggcgaccaatgctatccagctgcgtctcccctaaagtcggtacgtgagccgtcgcaacgaccgtagtttcggtcgggccgtagttgttaactaactgtggtttaaccggataacggctcagccagcgttgcagtatttccggcgcggcggcctcaccgccgaagaaaagggttcgcagcgatggaggcaacggatagtcactttcttcagataaacggcgcaggaattggtaagggagaaccatacgactaatgttgtagtgttcgcatagctgccagaaagttttggtgccggacagccattgatcgtcgcgtaagaccagattggcaccagaagtcagtgcggagaaaatctcgcataccgaggcgtcaaaggtagggttacagaattgcaggacgttatcacccagcccaataccccaacgttcacaccaagggctaaccaattgcaccagattaccgtgttcgaccatcacgcctttcgggttaccggtggagccggaggtgtagataacataggccagattttcgggactgacggctaccgtcggatttgggatttcaccatggttttgagtgatatcagacatcaggcacagtggaatattgcagccgctgaaacgatgttgtccctcgctttgcgccacaatcgccgcaggtttggcgtcttctagcataaaattctgacgttctggtgccgtatccggcggaatggacaggtaagccgcaccggccttgagtgttgccagcatagcgataatcatttctggggtacgatggctgcaaattgcgaccttatcctccactttaacgccctgagcaagcaggtgattggccaaatggttagccagattatttagctcggcgtaggtcagggacgtttgttgataggtgagcgcaatcgcttcgggatggcgctgtgcctgtagttcaaataactgatgggcgcaaacatctagcggataaggttccgctgtctgattccactgattgatcagtaggttgtattcgcgatcggaaagtagcggaatacgatcgacctgtaggttatcgtcacgaaccatcgcccgcagaacggtgatcagatagtgctgatggcgttcaatagtcgcctgatcaaatagcgcggtagcgtagttcagggaacccacgatcgaacgattgcgagtgcctaaattcagttcgagatcgaattttacgcgtgtaacctgcggatcgatcaattctacattcataccggttagcgccggggctacggcgtcgaagttttcccaagcaaacatcacctggaacagcggcgttttatccatgctgcgctgcggttgaagtaattcaacgacctgatcaaaaggtaattcctgatgttcctgcgcgctgaggctgaagtcgcgtacctgtgcgagaagctctgccacagtaggagcttcggcaagattaattcgcatcgccaatgtatttacgaagaaaccgaccagcgcttcgcattctgccgcctgacggtttgccactggcgttccgatcaccaaatcttgctgcccggaaaggcgtgatagtacgacagaccatgcactcattaatgtcatgaatagcgtagtgtgatgtttttggctcagacgacgtaaatcgtccgacagctgttgatccaaaacgatgggaaccgccgcaccgaggaaagactgctgagccggtcgctcgcgatcggacggtaaagtcatgcgttctggtatgccctgcaatttttgcagccaaaattggccgtgggcatgccactccgggctatccagccactgttgttgccactgcgcataatcaggatattgcagtggtaatgccggtaatgggttggtttcgccttgagaccaggctgagtaaagcacccccagttcgcgtgccaaaatctccattgaccagccatcggtgacgatatggtggataatcaacagcaaataatgctcactggcggcggtatgagccagactggcgcggatcaacgggccgtgggcgatatcaaatttatgggcgatttcatgctgatacagttgccagaaatcctcatcggcatgagatgacgcagcgaaatcatactcttgcagtggcgcttgtgtgccaaccggcagcagttgaacgtagccgaccccgttttccgcgtggaaaaccgaccgcaatgcatcatgacgatccagcaagtggttaaggcaacgctgtagaagttgggcgttaagtttaccattcattttcaacaataacggaacgttatagttctcatcgttgttccctagttgctcaataaaccacagtcggttttgcgggaatgacagtggaatccgcgcattagcatcaattcgtgcaatttgtgtggccgtttgttgcttggcctgagcaactaataacgccaattgagcaagcgttggctgggcaaaaaacgcccccatggtgattttgctctgccagcgggattgcatcttacttaagagcttcattgccagcagcgaatccccgccaatagcaaagaaactgtcattgcgcccaattctctcctgacagagcacttctccccatatttcatgtaattcctgctcggtgtctccttgaggagcctcataggattcgtgcacataggcattaaaatcgggggcaggcagctgcttgcgatcgatttttccgttaggcgtcaacggtaaatgatcaacggaaacataggcgataggcagcatgaattccggcaataacgggctcaggaaatcccgcagatggcgtggcagctcttccgtttcagtatttcccgccagtaccagatagctaacgagttgcttttcccctgatgcatttttataggcaataaccacggcttcattaacctgggggtggctcaataatttctcttcgatctcgccaggctcaatacgatagccgttgattttcacctgctgatcgtcacgacctaaatattccagagtgccgtcggcaaaataacgagccaaatcgccggtacgatacatacgctgatttttcgcaatgaaaggatcggcgctatagcgttcttcggttagcgcaggttgatttagatagccacgggtcacgccatcgccgctgatatacatttgtcccacggcaccgaaaggcacgggttttaactgattattcagcaaataaatggctgaattggcaataggtcggccaatggttggcagtgaatgggaagcgtcaatcagtgccacggtagcgtcaaccgtgcattcggttgggccgtacacattgaacgcggtaaagtgatttaacgctgacagacgcctccaggtctgaggagacaaggcttccccgccgattaacagaatcagtttttccacctgattaggcaaatcggagagtaataacatttccaattgggttggcgtgcagtcgaacacgtcaatggcattgtctttaagaaattgcactaaccgggctccatcaacgcgaacatcttgcggaacgatatggagctggtggccactcagcaggctgagcaggctttgtaatgaagcatcaaaggagatgctggagttgaggcaaacccttgattgtttagggtaatagtggaaaatttcctcgtttaacgcgtaatacaggttcataacctgcgcgtgttcgaccatcacgccctttggtcggccggtggaaccagaggtaaatatcacataggccagttgattaaccgaaagctgaggtaactgcagtggcgtatccggtgtatctatggcaagtaaggcatccacgtcataggtacggacatcactgctaccggctaatatttcctgacccaatgagtcaaccaacagcactgcgggttcggcgtcatgaagcacatcttttaaacgttcgctagggtaggcggggtcgagaggaacgtaacagccgcctgatttcagaatcccgaatagcgccgctatttgtaagcaactacgctccatgcacagggcaacacgcatatctgcctgaatgcctaaaccaattaaatggtgggcaatgcggttagccagcctatcaaactccagataagttaactgccgttcgccgtgacaaattgcgatggcatcgggcgttttttgcacctgttgttcaaatacctggtgaatacagctgtggttgttaaagtcgcattccctgtgattcagtgtctccagtagcagtaattcttcggctttaggaataaaattaatattgccaatagagcagggaaggttcccaatttcgacgctattttttaatccttttaatagatgactattaatttgagtgattcggttttcagctaaataggcggcattataaatccagcggaattgaccgtttaaggcattgatttgtaatgttagtagcgggaaactgtcgggatttatcctagagtgaataagaatgtcgccatcggtaatggccactgctaatgcatataaaggtttgttctgtaatagtttggtatttctcttcaaggtttcatggcgcagtacgatatctgtcgcatagctttgagcctgattgactcgctttatttctttattaagattttctgtaaaatcaaccaaggataattgatcacagatatcagctacatccatcggaacccaaggtgaggagagttgagaacagatatcttcgccctgacggaaggcgtgatagccaagctggaaactatgttcgccagaaaggctatgcaggtaagcggcaaacagaccgataattttcaaccaggagttatcgccggagtttggtaactcggaatattgccattccccaacggctaatctgctgcctccttcggtcttatcaagagaataagggaaatctaccgggttgaatctttgaagtttttccagccagaaaggctcatgcgtagccaaagtggccagttcggtagatagcgcttcggattgctgttggctcagaatcggtagccgatcgccagcggtcagatgaccttgttcggctaaggccgtagcgggaaccggggtgccgtccagcttgctgaaagcgctaattctgatatccgtagtagtggtcgttacctgccagccatcatttatgctatccagacgcaccagcgtgcctggggcgaataatgttttttctggtaaggtttcaacctgattaacgatgagtaattcattgttaattaatatttttaacttagttatcgcgggcggtacacctgccttttctgataacgccagtgccagattggcgatttgctgtgcatcctgtacctgccagttaataacggcggcggacagtgggtttcgcatgttttcaaacagcgttctgcgaggggaattggcccgcgcttccatgatttgacgatcgacttgcccaatggaattttgtggattggccgccagctgctcgaggataacgctgaatcgacggtggtggtcgaatatatcttccaggctgtgcagcctgtcacttccgtaaaagctgatggatagccctttaccgtaacctttatcgtcgaatacgacagaaaagccgtgggtttgggagccttttgcttttatccatttggtctcgcagtgttggaagggcgtaccgcgatcaaatagcatcagattaattgctgggccgaaactgaattcctgcttgttttttcgtaatatattttctccacgatagcgctgatgttttaatatctttgtcagctgcttattcatgtttctggcaatatccagaatattatctgtgggagttactgtaacttccagcggtaaagtattcgatgtcattcctatcaggtttttggattctttaccaatgcctgttaccgggaaactgaaactgagttctttaactccggtcaaggtatagaagtgagcagcgacggccgcaatataaatatgcgttggccttagattatttttctctgcaatgatctctatcgatttattaacagactcgtcgatatattgttcttcttttaatatactccgatcgttaggactgtgactaaggaatgaaagacggttagcattgctagccttctgcaagaaagtatcccaataggctttatccagagtgaagcgttttgactgtagatattcaatatcttttctagccagcaagtctggttcgtcaggaataatagtctccggttcttttccagagattaattcatcatatcggtcgctaatgcgttttgagatgagacccagactccgaccatccataaggatatggtggcagcgctgatagtaaataaatttattttgcggtaaacaaatcaatgaaaagttgagtaggttttcatcttctggcgaaatcaaagtagtgatatcagcctgtatccaggcgtccaaatcgaagctttcatccaaattatcagttttatcaattatatgtaaatttgtgtcaagagtgttatctacatattgatataactcgccgtcgatggccttgaagcggcttttcatcgcaggggtttctgcaacaatgccacggagtgctgtttcgaaaacagagatgtttaaatttccagtaatttccgcatattcggaaatattaaagggtaggtctggcgataattgctgtatcagccaaacttctttttgtcctaatgttgctggggagtaaacacagtttccgttattctgcttaatgctgtccatcttacttttccctactggataaatgccaatttgtcatattcatctgaaaatgaatgcggaaaataaatagcacaaatttattttattgtcacagtgagataatcaaactctaattattatgtcttaagaaactaaccttatgttttaaatgattttattttcagaataggcgtggtggacacccattatttgatttaagtcgagttcatcatttaagtaaatgggcggaagtctgttgatgctaatgaatcgctattcttatgacttgagacaatctttaacttgttagatatcacgtattaatctttatcttatttacgattaattagtatcctgataaattagtaaatgaataatatatggttaatatactaggtaaaaatatctacggtgataaattaattatttaacgtgtaatttaacttaaagaggaccaatccatgttggttggatatgcccgtgtctctgcggatgatgaaaaattgaatttacaacgcgattttttaaatcaggtagggtgcgaaaggttatttgaagaccatttcaacggagcaaaagtggaacggcccggtttacaacaagcactaaactttgttcgtgctggcgatacactcgtagtgtggcgattagatcgtctgagtcgttcacttaaagatctgattggaatgatggcattattggaaacaaaaggcatcgcgctaaaaagtattgaagatggtattgatacctcgaccagctcgggggagcttatttttcgactttttggcgctctggctaaatttgaacgtaatgtgatcaaggaaaggaatcaggcaggattaagggctgcgcgcgcccggggccgtaatggcggcagaccaaaagcgctgagtcaggataaacaggatttggcggtaaaactttatgatgagaaaaattataccgtggcgcagatttgccagatgatggggatctctaagcctacgctgtataaatatcttggtgccgccagaggtggccgcacggaataggatccatgtctctcggtcgatccttgcagcgttcagcggattgtatgttaggaattgattaattttaatcacgccttgatcaccgtagaaaccaagcgtcagatctggatacagggagggaagtcttggggcgcagatgttcgccccaatccaataaggaaagaatcagcctaataatgcgcagtttggcggtagacgacataagagtgccgcaggcatcacttcaattcggaactggctaccagacaggggttcgccatccagattgaatctgatgtcatggggtgcgctgatttccagccagggtagcgtggcgtcgatgacatttttgttttcttcgccgctgaacaggctggtcagcagtgcgggcagaagttcggtggccgtaagcagtcgcagctgtagtaagccgtcattaatcaatgcgttcggacaaagttcttgcccgcctccggcctgcttaccgttcccaattccgatcaccagcgcttcaccagaccaatgaaaatccgggccgcggatctcgcattgatcggcttttaatgtgtccatacgcattaaaccgtggacaaagtatgaggcaccgcccaacgccgatttcagcatcgcaggcgtttcggtagtaatgcgtgcgccaaatcccccggttgccatattgataaaataacggtcgtcattaactttagcgatatcaataggaacggcgcggccttttatcgccagctgcaaggcattatcgatttgcagaggaatactacaggcggtggcgaagtcgttagccgtaccgagaggcaaaatgcccaggctgggaagcgtatggccaggtggtaaagccgctaacgctgccgcgacttcattgatggtgccatctccaccgccggcaatcacggtatcgacccccagtgcgatagcctcgttaacataacgggcggcatctccctgttcccaggtggtacgcacatgtagggttaatccctcatctcgcacgttttttactgcattacgcacttctggatttccgccttctttaccgttgagaataagaaggctgggtggcgtttgagtcataacatgctccggaggtggtaggttatatcactaacagtaaaccataacgctttgctctgactatcagaatatttgagtaaaatcgcagaaaataaaaagtaagatcgggtaggttgattcctataaataggggatagcgtagagttattctggattagaattaaactggattcggagtattattacgttaattcgggttaataaattaagtgaaatttattgggttattagcgattattttaacgcgttaggttaattatttagtggtgaaaaataacttaaaattcaattggttaagaaattaaaaagaaaaggccggcccaagggagattgggccagccaaggaggtggttcctagtcttgctgtctaactattttagttctttattgtactcgagctatagtaccttgcagacattataatagatgtgatctatttctaatatttgtcaaaaatgccactcattgagtggcattagatattaagtctaaatactactgtttttcatgcggattacgcgtattagttccatccagattacggattagcagtgcatattccacatcgatttcttcgggaatgggcaaatacatgatatgtccatttcccggagcaacctcagcagcctggccttttttatccagcatgctttccagcgtaaactgaatattgccggttggggtcattaattcgacgctatctccgacggagaatttatttttaaccaccacttccgccagcccatcccgccggtcgccggtaaattctccaacaaactgctgccgctcggaaactgagtagccgtagtcataggtttgttggtcttcatggacgtggcgacgcaggaatccttcggtataaccgcggtgtgccaagccttctagcgtggtgagcagcgaaggatcgaaaggttttccggcaactgcatcatcgatagcgcggcggtaaacctgagcggtgcgagcgcaatagtagaaggacttggtacggccttcaattttcaacgagtgaacgccaagctgagtcaaacgctctacgtgctggattgcccgtaagtctttggaattcatgatataggtgccgtgctcatcttctgaggcggtcatgtattcccccggacgcatggcttcctcaatcataaagactttatcggtcggtgcgccgatacccagcgttggttcgacatttttcaccggaattggctggtgaatatgcacgatattgccgatatcgtcctgtttgccttcttcaactttatattcccagcgacacgcattggtacaggtgccctgattcggatcacgcttattgatatagccggagagcaggcaacggccggaataggccatgcacagtgcgccatggacgaagacttccagctccatttctggcacttgttcgcggatttcagcaatttcttccagagatagctcgcgggataaaatcacccgagtcagccccatttgctgccagaatttcaccgtcgcccagttaactgcgttggcctgcaccgacagatgaatatccatctgtgggaaagcttcgcgcaccatcatgatcaggccgggatcggacataatcagcgcgtccggccccatatcgatcactggtttcaggtcgcgtaggaaggtttttagctttgagttatgtggggcgatattcaccacaacgtagaagcgcttgcctaaagcatgggcttcctgaatccctaaagccagattttcatgattaaattcattattgcgaacgcgtaggctgtagcgaggttgaccggcatacacggcatcggcaccgtaagcgaaagcgtagcgcatattcttcagcgtaccggctggagacagtaattcaggtataaacatgggagattctcagtctgagttcaagtcagaaccacgccctggggagtggcaaaagccgatgattgtagcgccagaaaagcggaaaatcagcccttgcacaatttttgtagggtttaaatgatctggatcaaaatagccaagaagagcgcggcctgttactgccgcgcagtcgttagtagggtacaaattaatctacagcgtcaggtctttaatggtggtggtggggccgtttttcgttacagaggcaatgccatttttagctgcggcttcagaactataagattcgctgacgccgataacttgatgattcttggctttcagcacaaagtaaggttcatttttaacgttgtgctttaattcgtattgagcttccaggggagaattgctttggactgatgcgataccattttcagcggatgctttactggcgtacatctcgctggagagaataacttcattattgccggctttcagattgaaataatattgaccgttcttcgcttttttaagctcatagtagccgatggccatagtgtttctcctgttggttgagtagtctcctaatcagtgtagtcaacgctatccataatggagattcgcgtacctgactcagccaacataacgcacctttggcataaaatacattagagcaaacgacccatttcagcctcccagcggtagcccattccatatactgcgcggataaagggcttttcttcatcgaaggactccagttttcgtcgcagatttttaatatgactgtcgatggtacgatcggtcacgacccggtagtcgtcatacagattattcagcagttgttcacgggaaaatacgtgccccggctgcattgccagaatcttgagtaaacgaaactctgctggagtgagatccagggtgtgaccctgatagctggcgtggaagcgtgactcatcaatttgtagcggtgccatgtcactgggcatttctcgcgggctatagcagcggcgcaaaatagttttcacccgagccaccacttcacgcgggctatacggcttgcagatataatcgtcagcgccgatttccagcccgagtaaacgatcgatttcctcagttttcgctgtgaccatcacgataggtacatcggaaaaacgacgtatttcgcgacagatactgataccgtcgctgccgggcagcatcaaatccaacaggataatcgctggcggagcttgccgtaccgaggcgacgacttcagcaccattggtcacccatcgggtctggtaacccgcggcctgtagataatccaccaacagttgcccaagcttaggctcgtcttcaacgatcagtaccgggccatgttggcctggggcgaaaatagcttcattcatggatatttattttcctggtgaatgtgacaacggaaagtctaccttaatcaatacgccgcccaaaagtgaatgttcggcggcgatttttccgccgtgggcttcgacgatattatgacaaatggccagacccagccccgatccgccactcgctcggttacgtgaggtttccgcgcgataaaagcgttcaaagatccgctgtagctgttcgtcgctgataccgggtttgctgtcttgccagcacagcgtgagggcattgtcatcgagactcatgctgatattcagttgcccaccgttgttggtatagagcaggctgttttccatcagattatggaatagctgggtgaggcgatccgggtcgccgaatatcatggcctgtccgggtaagtgagttgttaccgtcagccgtttttcctcgatgcgacttcggaaactggcgagcgctacctgcaataaatgcaccaaatccagctgagttttacggtaagccagtgccccgcgatcggacatggaaagctgatgcaaatcgttgactagtttggttaacatcgccacttcggcttgcaaggaactgagtgattccggcgtaggttggcgaacgccgtcctgtaaggcttccagctcgccgcgtagcacggccaacggcgtccgtaattcgtgagagacgtcggccataaagtcgcggcgcatttgctcatttttttccagcgagctggctaactgattgaaatcttgtgccagtcttcccagttcatcgcggctactgacggctactctggtgctgaaatccccggcagccagtcgatgggtgccttccaccaaacgttttaccggagccagcatcccccgcgaaagtagccaggttacggcggcggctagcaaagtggagagggcgacaatcatccaactggtacggcgttgttgcaggtcaaaattgatatcggcatcgcgagtgagtttttccgagggggtggcgatcacccagccgacgatctgatcgtcatattttatggggaggcgtgaaccctctttaggcactgctccggtgtggccaaccaacagcttaaagtgactgtctactacccaaaactgggtgcgccagccgcgtggcggaagattatggctattatcgctgttttgctcgaaggatcgcatgatttgatacaccacacgatcgttattacgcaggaaattccaattgccgtagtgcttgtattgttcttccaatgcgtcacccagcatggcgatacgttgctcattgctgtgcttgatataatcgataaaaccgcgctcaaagctagcacgcattccccaatgcatggtgattaacaccaacatacaggtggcgaaaatcgccataaataacttactggtaatgccaattctcatgctgtcctcatttctggcctgttgtatccagagtgcggtttttacgaatatcctgcggtactttggcaaagattaacgccggtaaggcaatgacaatcgccatgcagagatagctgtaaaggaaggcgctgtgggtcgccggtgagttagtgacgacctgattgtgggcaaacataccgagaacgatcccggcgatgctaacgcccatactcatagccaactgcatgaccatggataacagactgtttccactgcttgccagcctgtcgggcaagtctttcagggttagcgtattcatagtagaaaaccgcaaagcgttgagcattccctgaaagaataaaaccactggcagcagccatagccagcccatcagagcgactaacgggaagctcaggctaaccaccgccagtagcagagtggcactgaccaatacctgacgatagccgaagcggttaaccacttgcacgataattcgtttaattcccatgctaccaataatcatgggaatcatcatcagaccagcgtggaacggagtaaaacccagaccaatctgtaggaaaatcggcgtcataaaaggcagcattccactgccgatacgccccgtcatactgccaattagccctaaagtgtaaactttattcttgaacaatcgcagcgagaatagggctgaaggattacctttggcgtgccacccatagcccagcagcgccagcagcccgcaaataattaatccaacaatggcggcggggtgcaggccaagtcctttatggccgtcgagcgccagtgtcaacgtagccataccgactgccaacatcaaaaaaccgctgatatcaaaccggcgagtttgcatggtgtaattaggcattaacatcagagtggcaatggcgcctatcaatccaaccggcaaattaatcaggaaaatccaatgccaactggcgtactccaccagaaaaccgccgagcgctggccccatcagcgggccaacctgtccaggcagagtcacaaaggccatcgccgccatatattgttcgcgtggaacgattttcatcacggttaaacgaccaactggcaccatcatcgcgccgccgataccttgaatgacgcgggagaaaactagctcattcagggacgcggatcgagcgcacatcagtgagccaatggtgaacaggataatcgcggagaaaaacacccacttcacgccaactcgatccgccagccagccgctggcagggagcataactgccacggtcagcacataagaaacaaccaccgactgcatacgcagcgggttttcccccagactggcggccattgacggcaacgcagtgttgacgatagtggtatccagcgcctgcatgaaaaagccaaaggcgacgatccacaactgccagcgaaccgacgtggaccgaagcggcgttagcgtttctggggacatattactcaatcctctgtaggggctgacggctaaaacggctgcacaggcgatcgaaacacaggtaaaccgccggtgtagtataaagcgtcaaaagttggcgcataatcaggccgctaacgatgctcatccccaaggaggggcgcagtttcgcgtcgtcgccgcagcctagaaccaagggcaagacgccaaatagcgccatcagcacggtcatcataatcgggcggaaacgtagcaaactggcctgaaagatagcctctctggcattgagattgccgtttcgctgcgctgccaaagccaactccaccatcatgatggcgttatttttcactatgccaatcagcaacataataccgatcagggctttcatactgaaaggcgcgtcaagcaccgccaaagccaacaacgcgccgacgccagcggaaggtaacgtggacagaattgtcagtggatggacgtaactttcattttatccagcgaactgacgtcctgcgtatattgccgggcgacttccatcacgactttgtattgatttaacggctgataatgataaatagtggagatctgtcgttgcccaaaagcgttatttagcaatgtattggcatcggaaacgcgggtgcccaagcgcgccagcctttcacgatcgacagtcagccccagcttggcacctttgtgttgttgagcggcgttaacgtccgccagctctggcggtttggcaaatgcggcgcgaattttggctccccagatgcgccaagcgctcagaacgcccacctgtaaagtgtcgtggttactggcgttagattgcctgccgccaatgcggatatcctgtgctgcggctaaaaacaggctggctcccggctctttggtaccgcttgcttggccgccggtgtgaagtggcgccagacggtaatggcgataatcacgacggccaccagatctgccagaattaccgagcgggaagtgcgtataggtttggcattcatagtggcgaaggattctcttttatgcttgtgattttacgtggagacgatccgtaataggcgttagccagataacttatattttattagtttagctgtcttttcacggagaataatgaaggaaatatggaatagaaagctgattcttttcagttttgtctgggtaacgttctgttttgtaaaaaatacggcattttaaaggatggcggcgcggaaaaaagccattgtgtcaatgagtcacggaaaggaagaaggctgcggataggtgtcaatgaggcaggaaataaccgttagttaaccggtgcatcctgcctcaacacattcactatttttaacgatacagcgtttgcgcccagcgtgccagaccagcggtaacggagccaaaatcattgcccccaaccagcggaatgcccggtaactgttgctgtagtgcgctgcgtaacagtggtgaacgggcgctgccgccggtcaggtagatcacgtctggcttgacgttgctggtggacagcgccaggttgacttgttcctgaatgcgttgcaacggctgagtgatggcatcggccaattgctgctgactgatcatttgccccaactcaggtttgacgaagtccagcgccgtggcgatctgctcgtgctgagacagcgcaattttgctctcttctgccgctcttaccaaacggtaactcaaacgctgttggtagactttcaacagcatttctacctgttgcgggttagccgcatcgcgaatcaaatcacgcaggaaacggccgttggccgtgctgtagaaatcgctctgcgccggaacatcgttggtggctaccgcattccagtaaggcaatgaaggcattgcgatgcctttttcggtttcgctacccataccaaacagcggcattaactgtttaaacgccagcatgatgtccagatcgttaccaccaactcgacagccgctgtgacccagcaggctttgctgacgatccgccatgccctgccagtttggtcccatcagtaacaccgaacagtcggtggttccgccgccgatatcgacgaccagcacggttttttcttcggtcagcgtcgcctcaaagtccagaccggcggccaccggttcaaattggaaagcgatatcgcggaaaccggcacgctgtgcggcgcgcagtaaaatgccttcggcctgacggttagcgtcttcgccgccagagccctggaagttaactggacggccaatgacggtctggctgatttcggtttgtacggcagattccgcctgacgtttgatgtggaacatcatggcgcagaccagatcttcaaacagggcgatttgctgaggttttaaaccggtcgccccgaggaaggatttgggggatttaacgaagtaaacttcttccggatcttcgatgtattgagccagcgccgacaggccaaaatgcaggctgtccgcattgactggaatatcttcttcacggttaaaagcgatggcccgccgtaacaactgttggttttcatcgctgccggtgggcacctgccagtgacgatgcaggcattcacttaccgcctctcgcgtgggcgcgcataacatggaaggcaaataaacgtcgttattttccaataccagcagttcgggagcatcgtcccgcattatggccacagaacagttcgccgtgccgtagtcaaaaccaatgaacataattgctcccaggccaaataaaggggggcgactttaccttagagtgcgcagaggagcaatcgacaaatcagagtcattggcgggaataattcgggtatcggttcaggttttctctaaatgacatttttgaatctgccgtaggctatttattgcttaaataaccgcagcctaaaatatcggtcagacgtgcggtgcgggcaatactgtcaccgtcgaccaaatcgacgccaatatgactaagtttatccaggatcgccaactgatcggcaggccccgcgagggttttgaccccggcttggtgagcggcgccgttgataatcgagaccatcacttcgtccatttgattggtatgaatattggcgatcagaccgacgtcgagttttaaataatccatcttgaggtgatttaacctactgaaaccattcatgttggctgaaaaatccgtcaggataagtttgccgcccagcctctgcaggcgagtgataaaattatcgatagtggacgaatggcgcagcagcgtagattcctgtatcaaccaatgcagatcggaggctggaatgacggattgttgcaggctatccagcaaaaagtggcgaaagctttcttcctgtagcgattcttcggataaagccacggcgaccttgagcgccttactttgaatattttcgccctgtatacataacaattggtggcagatccatttatctacctccgggcgcaggccataaagcaaggaggccgagagaaaatcgtcctggctcacggcctgtttgtcattcgggataaccgacgggaccagttggtagaaagccacgttattcggtatgagcggcggagcggcggcggtagccaaaagctctagctgattctcttccagaatatgcagaatttcatctttgctcagtagctcatgctggcgtgccaacagctgtttttgccgtggctggaagagatacacctgcccacgaccactgtgtttggcggtatagcaggcaatgtccgcctgctccatcagttcactacgcttgctgttttgactattgatttgggttataccggcgctggcgccgatacggtattgcttaccttcccagtagaacgggtagtcattaatcagcgaaaccattccctgcaccacggttttagctctggtgacgctgcagttttgcagtaacaggccaaattcatcgccgccaagacgggcaacgcaatcgctagtacgtaaatacttacgcatcaacgcgctcaattctgttaacaacgcgtctccggcggcatgtccggctgtatcgttaaccgctttaaagcgatccagatcgaggaagcctaatgcgtgctgttgattatgttcgatgcttttttgaatcgcatttttcagctgatactcaaaattcgcgcggttaggcaagctggtcagattatcgtgcgaggcgctgtagctgagtttacgcatcatttcgcgcgattcgctgacgtcctggaagaccataacggcaccgacggtttccccttccaaggttttcagcggcgcgacggaatccttaatgtcataacgttcgccgtcccgattgtgcaaaatcagcgaaaggttattttgcggcggtgaaaccccgttaagacagtaccagaccggattttccacgtttaaaccggtgctgctatcggttaagtgaatgatttgatcgataggttggccaagggcgatggtattggcccagccggtcattttttctgccaccgggttcataaaggtaatatgcatttcccgatcggtactgattaccgcttcaccgatggcgtccagcgtgatatgcaggcgttccttctcttcgtgcagggcttctgtcaggcttttcacttcggttaagtccagcgcagtgccgattaaacgcaaaatatcgcctcgactatcgcaaatcatattggcctgattacgaatatggctgatttggccgctgcgagacacaatgcgatattccaatcgatagggctgacagtgagtcagcgccgcggcaaattcgcggtcaatgcgcgcacggtcgtcgggatggatgcgatctcgccatgcctctatgctaggaatcgtattcggcggcagatcatacagttcgaacattcgtttatcccaactgatggtgttctctttcaggttccattcccaaattcccactccaccggcttcattcgccagggtaatgcgttccatcagccgacgattgaccatttcggtttttttcaggtcattaatatcttcaacctgagaaataaaatagagcggacgctgctcgtgatctcgaaccacgctgacgaccaatagcgcccaaaccacttcgccgtcgctgcgaatatagcgtttctccatggtgtagctggggatcacgccgtcaaacaggtcttccaatagcttgagatcggcggtgagatcttccgggtaggtgatttcctgaaaggttaaattgagcagttctccttggctgtagccgagtaaattgcacaaggctttgttgacctgtatccatttaccttccggcgacaccagtgccataccgatggccgaatattccatcgcgttccgaaaacggttttcgctctcgataatatgatctttttcagtgcgaaacgcgtgcatcaccatcgacatcgcgtgtggcggcactaacaccagtaatagcggaataaacgtaaaagcctgaataaatagctgaccgctcacctgattggtgaacagattgaaattaatcatcagcgcaatcaataccgcggtgagacagaagatgataaatgcttccaatcggggcagccgaatagcgacccaaatcagcgccatcacgatgaaagtaaaggggaagggtaggtaagtcagcgccagataacagcaagttaaagataaaattagcatccagatcatttcaaacagagtttgcgatcgcagggatgatctgaaatagccttgctgataaagcaacccaacgggtgccaacgccaatatgccaatggattcagacataaaccaaagggtgaatagctggccgaaatcgcggtggtccggagccagataaaatgctgccgcgaagccgctgagtatggggatcagcaaaactgccgtcaaaacaaatttaagccagctaaacaggctgtgtagcggatctttcggcattaacaggcggcgtagcagccaggcaccggcgatagactccaccagattgattagtgtcaaagggacagaaaaccagctagggccgtagagcgtgatattcgccagaataatagccacgccagcgacaagcagttgcagcggccaataacgtaaccgcagatgaaataaagccaccatcaaaatagcggtagggaaccacagcggcgcgaggttacgtgaagtttccgacagttggatgcaaaaaagcgcgagcaggtaaatcaggccgctgataagcgcgatgttcagaagaacatgatatgaatgatttcgtgctatcgctctgattctcatggcgaaccttatgtgtaacctgcgaattgccagcggcataggaaaaatgccgctggtttttgaatcctagtacagaagggcgatactgaccattgttccgcgcgttatcatggttgatatcgccgcgagaataagccctcgtttcacatgggttcctaaaaatgatagtgagatcagaccaaaaataacgttgccagaccgaggaaaataaagaaacccccagtatcggtaatcgcggtgatcatcacacttgagccaatcgccggatctcgccccagccgcgccatggtcattggaatcacgacgcccatcagtgccgcaaccaacagattaagcatcattgccagcgtcatgacgccgcccatggctaaatcgccgtacaggatataggtcacaatgcccataataccgccccatactatgccgttgatcagcgcgacacccagttctctcatcatcaggaatgaaatgttgctgttgcctaattggatatggtgcaacgccagcgcacggacaatcatagtaatggtctgattgccggtattgccgccaatgccggccacaatgggcatcaatgctgccagtgcaaccaattgagaaatggtatgttcgaataaacctattactcgtgaagcgataaaagcggtgcacaggttaatggccaaccaggaccaacgggtgcgaaccgcgcgtcctaccggagagaacacgtcttcttccgggcttaacccccccatacgacgtaaattggtgtcgctttcttcattcaccacgtcaacgatttcttcgatggtcagtcgtcccatcagcttgcctttggcgtccacaacggcggcgctgatcaagtcataacgttcgaacgccccggcggcgtcttctgccttttgttccggctggaaagtggtcggctcactgttcatcactttgaacacctgagtatccggtgagtgcagcagaatggtggtgaggggcaattcgcccagcagcgtattcttccgatcgatcacgaaaattttatcggtggcatcgggaatgctcttacgatagcgcagatagcgctgaacggttcctagcgtgatgtcggcacgtaccgtgaccagctcgaagtccatcatctggccgacggtatctcggccatattgaatcacttcccgcactcgcgctcgttgagccggatcgagtgacgtcagcaagcgccccatcaggttgcgcggcaggtattcggccaaataagcctgctcgtccacgtgcagattgcgcatggctttcagcaggtctttatcgctcatttcttcgatcaggctgtcccacaccgtttcggaggcttcaaccagcgtatggccgcgagagttgttatccaccagacgccacagcgccagacgttcatcttgcggcaaagcttccagtaaatcggcgagatccgcggcgtgtaagtcggccagcaaatgcttaatctcggcggtttgatccagcaattgttcatcgctgagtttttcccgatcgtccaggcgaccgagaataccgtcaaccagcgctttattattcagtaatagcgaaagaatacggtgacgaatagcggccagttttttagcgtcaaatttggcggacgttgggtgctgatgtacgtcggaaacggtaggggctgacatagtggtccttaactcaatgcattatggggggataaccccgctttttatttgttcgcgtcatgtcagggtgacagaggtgttcggcaaacggtggccgctatgcagccaaaatttttgtcacggttatttatgattatgggttttatccgcgtagcgcgattcgccacgctcaagactgtgggataggtaagaggtctgcggcagacatcttacctatcttaagaggcaaatcagctattaaggcgttaaatcaggctgaggcggcgtgtattcccgatccaccggttgctcaatctgttctgattgattacgttcctgatgatgaggaatcgccgcgattgccgcgtaaagtaaacggccaaacagaatgataaaactgaccagtaatatgattttggttaactgcgtcgattttttgtttctcatactcgtttttgcactgtgttgtccgttagagataagcatcaggggccagctgcgacccctgaattcggagagcatcggcgttaatccgtctcgttttctgcttctggcgcgtcttcttcctcgataatcagcttccagccgattacgtcattccaataagcctgttcccgttcaacatcgagctgcaccagactgttttgtgaaaagtagccgtaagggaagcgcagagtccaatgattatcatcggtgatcagccgtaagctttctggcttagtggtggactggcgttggttgttcagtaaggcacccaagcgtagcaactggatcagcggcaggtagtatttctttttaaacaggttaagacgcggtaattcatccagtttcatggctttacgatggaatcgcaccagtgacgccagtaataattgctgttcctgattaaagcccggtaaattggtgttttgcagaatataggctgagtggcgatgcattccgctgtgattgatactcagcccgacctcatgcagcatggcggcccatttcaacagcgcttcgagctgcggctgcaccaatttagggttttgctccatccactgggtatagagtagctcggtggtttccagcacccggcgcgcctgttcgcgatcgatattgtagtgatcggccagactttttgccgtccgctgacgaatatcctgatggcggaaacggccttccatttcgtacagcacgccttcacgcagcgcaccgtcggaaagacgcagatctttgatcgctaacgcatcgaatacgccgcacataatcgctaaacctggcacaaatactgattggcgatcttcagataaacccggcaggctcagcgcgctaaactgcttgaattgcaacacctgctcaaccagcatttccaaacgttctggcgtaatcaaaccgtctttttcacccatttcgaccagcacttcatgggcggctttaatcgtacccgaagccccaagagcgtactgccaaccttgaatgcgatattgccatgccagcgtttccaacttttgcgccgctgccagacgagcgcgcttaaagttagccttactgatttcaccattcgggaaaaattgctgagcgaagctgacgcagcccatgcgacggctttctgccaatagtggttcaaaatcttcgccgataaccagttcggtcgagccaccgccgatatcgatcaccagtttgcgacctttctccggctgagtgtgttccacgcccataaaaatcagacgagcctcttcctgaccggaaatgatctcgatcgggtagggaatcacttcggcggcgcgtttcagaaacacttcggcgttggcggcctgtcgcagggagtgcgtccccacgatacagacgttatccggcgagaaaccttgtagccgttcggcaaatagagccagacaggccagaccgcgttccatcgcttcttcgctaagaatattgttactgtctaatccatcagccaaatgtacgcgctgttttaagcggcctaaaacctgaagtgcgccgttaacgacgcgggcaatcaccatatggaaactattggagccaaggtcaatggcggcaatttcctgcggtttagtggtggagttactggttagcggcatagttttaggcctattgctctggttgttccagcgcttttaaataatcataaatggcaatctgtgcacgtactttgcgccgatttccgcgcggtacataacgattactcagttctttatcaatataacgggcttttaccgtgtcgttgaacagtagctctaagatatccaacactcgctgtttcagtttcgaatccagcagggaaacggccacttcgatacgataatcaatatttcgggtcatccagtccgctgatgagagataaaccagcttgtcgcctttattctcaaatacgtaaacgcggtcatgttccagaaagcggtcaacgatgctggtgacctggatattttcactgatgcccggcatattggggatcaaagaacacattccgcgtaccaataaacgaatcttcacgccagcactggaggcgctatataaccgatcaaccagtcctttatctactaaattattaattttcagcgtgatcccggcgctttctcccgcctgtgcatggatgatttcctgatcaatcaattgatacaacatcaggcgcgagttttgcggtgataccatcaaattgtcgaatttaactggcctataagggttctcaataaagttaaatacccggcgaacctcattggtaatgcgtgcatcggcagttaacagcgagtaatcgctataaatacgcgcggttttctcgttaaagttacccgtccctatatgagcataacggacgatttggtcgccttccaggcgggaaatcaggaataatttggcgtgaatcttcagccctggcgcagagaaaataacgtgtacgcccgcggcggtgaggcttttggcccagtgaatgttggcttcttcatcgaaacgcgcctgtagctccaccaccaccgtgacttttttaccgttatgggcggcgtgaatcatagattcaataatgcgtgagtctttggcgacgcgataaatattgattttgattgccagcacgctggggtcgaaagacgcctgacgcagtaattccagcacgtgttcaaaggtgtgataaggataatacagcagcacatcctgctcacggatcgcgtcaaaaccgttgcggaatttatcaaaccaaatatggcgtaggcgcggcatcgggcgattcaccagattgcttttccctacgttagggaagccgatgaagtctttgaaattgtgataacggccaccggcaatgacggagtcatcattggaaataccgagtttatttcgaagtaattccaccatttcatcgggcatatctcgctgataaacaaaacgcaccggctcggcggttaaacgctgcttcagactggatgacatcaactccagcaggctggactccatttccgtaaccagatcgtattccgcatcgcgggtcattttcatcgaataagcgttgagcgcatcgtaatcgaagaagcctttaaagatttcatcgagacaataacgcagaatgttatccaataagatcattggcttgcgacggcgcggagcttctggtggcaaattaacgaagcgcggcactttatcggaaggaatttccaacagcgcataggcgatttcctgcccgcggataatctcaaccgccagataggtgtaatcgtctttgagaaattgcaccagattggtgtcgtgattgatcagtatcggcgtaatgtgctgacgcaaatgctgtttgaaatattgtttgagccaaatctgctggttctcagaaatctggcgttcattgatcaggaaaatctgattccgcgccatttccaacagaagttcgttatacaggctgtcgaattcctgatcggctttgaccactttggcctgaattttctttagcaaatggcgagaggacacgccagagccttgctcttcgctaataagaattcgccgctttaagtcggcaaaacgaactttataaaattcatccagattattggagtaaatgccaagaaagcgcatccgctctattagcgggttgctcttatccgcagcttcctgcaatacccgttcgttaaaggataaccagctgagttctttctcggtgtagagcttttcctgacccattgcaactccattcagatttttgtgggagtatttagtgtccgtagacattattgcgagagattgacaggaaagtccaacagatatcattagttaacattgtcatgcaaacgccataaaactgacataagatgctcggtcatctcagcgcgcaagggcgaatgagttatataaatcatctataggatctagtgtagggcatggggcaaagcagagtagtaccactttcaggcagagatcgccgccgggctatgattgaccgcgtggtaggcaggatggtgagcggtagcggcctgctggtgctactgaccctgatgctaatttttgtctacctgctgtatgcggtgctgccgttatttaaaccggcggcgattagcctgcacgctcaatttcccgtgacccccagcgcctccaccttaagtatgggaatggattcccgaggggaaaagctgtggcgcatcgatgctcagggcaacggcgcttttattcgcctccagccggaaggtgagcaggctgaagggacgttactggcaactcaggtactttccgctcctcctacttcattgggacaggcttcgggattgcaggcgttgggattgagtaacggtagcctgatattggttcggccggattttagcggcggcgctcactggcatttccctttgggcgatcagccgcagccgctggatgaaaaaggacgtccgttgcgacatatcgccgtagcggagccacaatcacagcaattcacgctggcagccagcactgatgacgggcgggttttgctcgggaatttcactgaaaccgaacgaaaaatcacgccgctgccggaatccccgacgcggatagatcaactgttgttaagtcccgatggccactggctgtacttactgtcagcgacgcaggtttatctttaccagttggataatcgccccaaactgcgggaaatagtcgcgctggatcagcaggagccgctgcacttagcgctgttagctggcgggaaatcgctattggtacattcgccgcaggggcgtttgtctcagtggtttgacgtgccacatacccgggagcctcaggataaaccgccacatcttactcgtattcgcgagttctcttcggcaatggggctgctgagcgtggaagatcaccgccgggtttttgccacagtgactccagcgggagagttaacgctattttccagcattcaaacctctcctttattgcaggaaaaagtggctaaaggcatcagtcatgccgcattttccccgtggggtaacgcactattgctggaaaacggcgctaactggtcttattaccgcgttgataatgcctatccggatatcacctggcgcagcctgtggcagaaagtatggtacgaaaactacccggaacctgcctatgtttggcaatctacgtcggcgaatgataattaccagcctaaattcagcctgatcccgattatctttggcacgctaaaagctgcgggttacgccatgttattcgccgtgcctttggcattggccggtgcgatttatactgcgtattttatgcagtctggactgcggcgagtgattaaaccggcgattgaagttatgggagcattgcctacggtagtgattggtttgattgccggtatctggctagcgccggtgattgagcaatatctagcgggcattctcctattaccgttcttactggcgctggctattctgctgtgcggttggagcagcgcaaaactatctgagcgaattaaatggcgcctagctgccggttgggatgttgtggtgttgctgccggttattttagtcactggctggctgactttgatgctggggccgcatttggcacagtggacgctcggcttaccgctcaatgaatggctgggagataattacgatcagcgtaatgcgctggtggtcggcatagcgatgggctttgccttaattcccattattttttctctggcagaagacgcgctgtttagcgtgccgccgtccctgactcaggggtcactggccttgggtgcgacgccgtggcaaaccgtggtgagagtggttctgccttcggcctttgccggtattttttcggcgttaatgattggttttggccgggcggtgggggaaaccatgatcgtgttaatggctaccggtaatacgccaattattgacggcagcgttttccaagggctgcgcgcgctggcggcgaatatcgccatagaaatgccggaggcggtagtgggcagcggccattatcgggtgctattccttaccgctctggtgctgtttatgttcacttttgtggttaataccctggccgaagcgatacggcttcggctgcgggaacgctatcaaacggagcgggatgcgtgatgaaaagctggtttaaatcaggctcgccctggatctggctgacggccggttcggtcagcatcagcctgttggccttgctgggtatcatattgttgctggcagggcagggaatgcgttatttctggcctgcgccggtttatcagttcgagctgaaacaaagcggtgccgggctggtcagcttgatcggagaaatctatcagcagcagcagatcacacgggaacagctggcaacggcggggattcctctagcggacggacgtgattctgtgacgcgttatctgattaaaaccggtaatcgggagtttcaggggcacgattttcagaccttgcttgacagcgatattgtacagcggtgccagccgaaagatttgctggtgcttagccgtttgaatcacggtacagcctacggttttatggccgggatgctggataacgggcagccgctggtgggggataatattccgctggagctgcaaaaacggatcccgcaggtgcaggcgttggtcaggcaaggggatgatattcagttccgccagatgaacatacttaaccaacaggttgagaatttgcgtttgcaggagaaacatctgcaaaccgccggtaagctggacggacgagcgcaagatcgcctacgcgctgaacgcggagaggtacagcgtcattacgatggattggcgacaactttgcagggcctgcgcgcggaacaaaaccgctatacgctgttgctcaaagatatgcagggtcagatacacccgatttccctcagccaaatcagtaaagcttggtatcccaacaatatgactttctggcaaaaagtcaggcatatggcggggcagggacataaatttctgaccgacagtccgcgcaatgccaatagcgaaggcggcgtattcccagcgatttttggcacggtgctgatggttatattgatgtcaattatggtgatgccgtttggggttatcgccgcggtttatctccatgaatatgccaaacgcaattggttaacgcgtacaatccgcattgcggttgtgaatctggcgggcgtgccctctattgtttacggtgtctttgggctgggcttcttcgtctattttatcggcggttcgctggataagttattttatccggaggcattgcctaatccgacctttggcacgcctggcgtactgtgggcggcattaaccttggcgttactgacactgccggtagtgattgtttctaccgaagaagggttatcgcgcatacctgccagcctgcgtcaggggtcactggcgctaggagccagcaaagccgaaacgctgtggcatattgtgttgccgatggcggctccggcgatgatcaccggcctgattttggccgtggctcgtgcggcgggggaaaccgcgccgctaatgctggttggcgtggtgaaatccgtaccggtattgccggtagacggtgtattcccttttctgcatctcgaacgaaaattcatgcatttgagtttccagatatacgatatggcattccaaagtccgaacgttgaagccgcgcgtccgctggtatttgcaacggcgttactgctggttgttattgtggttgggctgaatttagccgcgatgggaatacgccatcatttacgtgaaaaataccgtggcctgatgctgtaatgacattatttaactcgcaggaaaccttatgggactgatgataccggacgccttgcccgtactggatgtacggcacctgagcgatgaaaataccgcgctggcggtagagcatctcaatctgttttatggtgaaaaacaggttttgcacgatgtttctctgcgtatccctaaaaatcgggtcactgcgcttattgggccttccggttgcggtaaatcgacgttattgcgttgttttaaccgaatgaatgacctgttggaacattgtcgaatggacggcgaaatcagaattggtgctgaaaatatcatcggaaaaaaggtcgatgttgcggcgctgcgccgtcgtgtgggtatggtgttccaacggccaaatcctttccctaaatccatttatgagaacgtggtttacggcctgcgtttgcaaggaattcgcgacagacgggttttggatgaagctctggagcgtgctttacgcgccgcggcgttatggcacgaggtgaaagatcgattgcgggagaatgctttccgtctttccagcggccagcaacagcgtttggtcattgctcgagcgattgccatcgaaccggaaattttactgttggacgagcctacttcggcgttggatcctatttcgaccttgaccatagaagagttgattacttcgttaaaacagcactataccgtggttttggtcactcataacatgcagcaggcggcgcgggtttcggattacactgcgtttatccatcaaggttgcctagtggaatacaacgataccgatggattatttacctcaccggccatgcggcggacggaagattatattaccggacgttatggctaagattcgattggttaggattatctgcgcaaaataacaccggagcccatggctccggtatagcggttaaggcgttttgatcgccggagttttatattttgtcaaatattggggttggaaaatacacatacggataaccgtgcggtattcgccgttgataaagaactcgtcgattaactcgccttcgcttttaaagcccagcttgctgtaaatgtgaatggctttttcattttctttatcaacaatcaaatacagtttatacaggttcaatacggagaaaccgtactccattgccagtttggctgcggtgcctgcataaccttggccctgatgggcgggatcaatgatgatctgaaattctgcccgacggtgaatatggttgatttccaccaattccaccagcccgacttttgtcccctgactttcgataataaaccggcgttcgctctggtcatggatatgtttatcgtacaggtcagacagttcaacaaaagcctcgtaaggctcctcaaaccaatagcgcataacgctggcattattatctaactgatgaacaaacggcaggtcatccctttccatcggacgtagcctgacgctggtagtgctagacatgcggattcctcgaaataataaataaaacagcggacgctgcgagggaattataaccacatagggcgtgggagaggagatattcctttagatgttggggtaaggtttatcatcaataatgatttgagtctctactgacggcgtaccgcgattcgttcccgctcaaacgcggctcgcttgacgaggagtgtacgagaggcgttttcagacccccatttgcgcgccaaccttgctcgggaaccgttatggcgagtgagaataaaccgaaagatttagctttcgcaacccacaccaatcttgtcgtggaaaagctcaaatacgttctttaaagtcaaaattagttcacagctgtaatcggagcaagttccggttgatattcgataagtgaataccttgttctatggtttaaactgactcattgccttgaatcaagcaataaaccgctttcctgccatcagccattgatcctgctaagctttcaatgatgctcatccatttttaactgaaaatgattggataaatacagccagtattagctgataaatctttaaggggacagaggtgattaaagctttttctcaagaaataaccaaagcggtagttgatccagtggttggtattggtattgcggagttggcgaaagggaaggcgctgaatagtttcggtacgcgtatcgcagcgggtaaaaaggtgggatgccatgcccattttcacggcgaggagtggtatatcattctggctggagaggggcgaatgtacctgggggatgtggaaaaccagaagttggtaaacttaagaaatcatgatgttaagcaaggggatatcttttgtataccgccgggaacagcccatcagttacaggctgaatcgcaactggatttaatctttttgtgcccaaatagccatctggtgacggatagaatactgttccccgatatgtgctaacccttgattaccggcggccagaaaacaacattggaacgttgggatcaaaaaagggccatatcacatggcccttttagcataaaaccggcagtagcttttattcgtcggctgcgtaaccctgtaagggcagctttttaccatccaaccaggcggcgttctcacgcatttccaatcgtccttcggtaaaccaactgaccaccaacggatagatattgtgctcctgcgcctgcactcgctcaatcacatcatcttcgctatcttcagaaaaaatgggcacttttgcctgtaagataaccggcccgccgtccagttcctcggtcacgaaatgcaccgaagtgccgtgttccgtatccccgttttcgatagcctgacggtgagtgtgcaaacccggatacttaggcagcagcgatggatggatattcagcattcgaccagcgtaatgctgtacgaattccgggctaaggatgcgcatatagccagctagcaccagcaaatccggctgataggcatcaatagcctgagccagcgctaaatcaaagctgacacggtcagggaaagttttggcatctagcgcatgagcaggaatcgcggcctgcgtcgcgcgctccagaccgtaagcctgcggattattactgaaaaccgcacaaatcgtacccgccagtcgcccttgttgctgtgcgtccatcagagcttgcagattgctgccttgaccagaaaccaaaaccacgatttttttcatagaagctaccgctatccgtctttttgttgatccgttacggattgatgacaacctgctctgctgcttctggcaatgcagcaatcgtaccgattttccatgctttttcgccggaagcggtcagcagttcaaccgccttatctgccagttcggcaggtaaggcgacaaccatacccacgccacagttaaaggtgcggtacatttcgtggcggctcacgttgccggcctgctgcaaccagctgaatactgctggccattcccaactggattcatcgattaccgcctgcgtgccttctggcagaacccgtgggatgttttcccagaagccgccgccggtcaggtgggcaatggcgtgaatctccagttgctcgatcagactaaggatagattttacatagatttttgttggttccagcaaatggtccgccagagatttgcctgccaagtgcgtttgctcaggatcggttttactgacttccagaattttacgtaccagagagtagccgttggaatgcgggccgctggcgcctaacgcaaccagtgcgtcgccgggagccactttgctgccgtcgataatttcggatttttcgacaacgccaacgcagaaaccggcaacgtcgtaatcttcgccgtggtacatgcccggcatttcagcggtttcgccgcctaccagcgcgcagccagactgtttacagccttcggcaataccggtaatcacgctggctgcggtatccacatccagttttccggtagcgaaataatcgaggaagaacagcggctctgcgccctgaacgaccaaatcgttaacgcacatcgcgactaaatctataccaatggtatcgtgacgtttcaggtccatcgccagacgcagcttggtgccaacgccgtcggtgcctgaaacaagaataggttcacggtatttttgcggtaatgcacacagggcaccaaatccacccaatccacccataacttccggacgacgagtctgttttactacgcctttaatgcgatcaacaaggtcgttgccggcatcgatatctacacctgcgtctttatagctgagagaggttttgtcggtcactgcgaggtccccacggaggttggctgtttgagctttggaagaaaacgcggcaattctaacagtctaggcaaacgtttgcgagtggcttgtgatggagtcgttgttttccatgttctagaattaagatccagtttctattgatctgaatcaggctattggttgtggcgttcaaaaaaaaaggcggtataatctcgcgatttttttggccgtcaaccgccttaataggagaaaaataatgaagatcgttgaggtgaaacacccgctggtaaaacataagcttggcctgatgcgtgaaaatgacatcagcaccaaacgcttccgtgagctggcttctgaagtgggtagtttgctgacctatgtggcgaccgccgatctggaaaccgaaaaggtcactattgatggttggaatggcccggttgaaattgaacagattaaagggaaaaaaattaccgttgtgcctattctgcgtgccggtctgggcatgatggaaggcgtgctggaaaatgttcctagcgcgcgtatcagcgttgtcggcgtgtaccgcgatgaagaaaccctgaagccggttccttatttccaaaaattggtttcgaacattgacgagcgcatggcgctggtggttgatccaatgctggcgaccggtggttctatgattgcaaccatcgatctgctgaaaaaagcgggctgccagagtattaaagtattggttctggttgctgcacctgaaggtattgctgcactggaagtcgctcatccggacgttgagctatacaccgcttccatcgatcagggattgaatgaacagggttatatcatcccaggtttgggtgatgccggtgataagatttttggtactaaatagttttaccagccgactgagaagtcggcttttttttgctccgcagcctaagaatatcaatcacctagtcagaggatagagaagatgagccgtcgcactataggggtcagcgaacgtccgccgttattgcaaacgattcccttgagttttcaacacctgttcgccatgtttggtgccaccgttttagttcctattctgtttaaaattaacccggctacggtattgctgtttaacggcgtcggtacgctgctgtatttatttatctgtaaaggtaaaattccggcctatctcggttctagctttgcgtttatttcaccggtattactgttattgccattgggctacgaagtggcgctgggcggatttattatgtgcggcgttttattttgcttggttgcaatgattgtgaaaaaagcggggactggctggctgaacgtcttattcccaccggcggcgatgggagccattgtggcggttatcgggcttgaactggcaggggttgcggccggtatggctggattgctgccagcggcaggcgcgacggcggattctacgaccatcattatttcgatggtaaccctgggtgtgactattctcggttcagtattgttccgcggcttttttgccattatcccgattctgattggcgtgctggtaggatacgcgctgtcgttcggcatgggtgtggtggatttaacgcccattcgggaagcccactggtttgccttaccgactttctatactccgcgttttgagtggtttgccattttaacgatcctaccggcggcattggtcgtgatcgccgagcatatcggccatttggtcgtgacggcgaatattgttaaaaaagatttgatccgcgatcctggtctgcatcgttcgatgtttgccaacggtatttccacggtgatctccggtttcttcggctctacgccaaacaccacatacggtgagaatatcggcgtgatggccattaccaaggtttacagcacctgggtgatcggcggcgcggcaattctggcaattatgctttcttgcgtgggcaagctggctgcggcaattcaggcggtgcctgttccagtgatgggcggcgtttccctgctgctgtacggcgtgattgccgcatccggtattcgtgtactgattgaatctaaagttgactacaacaaagcgcaaaacctgatcctgacctcggtgatcctgatcattggcgttagcggcgcgaagataaacatcggcgcgaccgagctaaaaggtatggcgttagcaacggtggtggggattggcctgagtctgctgtttaaagtctttagcctgatccagaaagatgaagaagtgattgaatctgccgaagaccaagcggcgaaatagtagctaagtgccggtgccactgagggattattcggtggtaccggccagtgatatcagggaaaggcgagattgatccctttggcgcttttttcaggatctaaatggtttttatgaagcttttgatttttgtggtaagctctctcggttttcttgcccgttttggttgaggtgcttctgaatacgccggcacagctttcactgccactttatcttcccgatgatgaaacttttgcgagtttttatccgggggagaacccatccctattagctgcgattcaggctgctgttcatcagtctcacggtagttatatctacttttggtcgcgagaaggcggcggacgtagtcatttactccatgcagcctgcgccgaactatcgcagcaaggggaagccgtcggctacgtgccgctggataagcgcgcctattttgtccctgaagtgctggatggcatggaacagttggcgctggtttgcatcgataatatcgaatgtattgctggtgacgatgagtgggaaatggcgatgtttaatctgtataaccgcattgttgaaaccggacgcactcgtttgttgatcactggcgatcggccaccgcgtcagcttaatttgcgtttgccggatctggcttctcgcctggattgggggcaaatctataagcttcagccgctctctgacgatgaaaaactccaggcgttgcaactgcgagcaaaactacgtggatttgaactaccggaagacgtgggccgttttctgttgaaacgactggatagggaaatgcgcactttgtttatgacgctggatcagttggatcgtgcctctatcactgctcagcgtaagctgacgattcctttcgtaaaagatattctcgggctgtagcgactgaacgagaatggacccgaaaggtgcccattcttgtactgaatatcgttacctatctcaatggattataaaatctcaagcacctgctccggcgggcgacccagtcgcgccttaccctgatgaataacgatcgggcgttcaatcagttttgggttattcgccaaggcttgcaacagttgcgtttgagacaggctgctatcggccagatttaacgttttatataactcatctttggtacgcattagcagtcgggcatcgctgaaacccagctgttgcagcagttctgacaacgttgcagcgcttggcggcgtatccagatacagcaccacctgtggcgtaatgcctcgttgttccagcaaagtcagagtctcacggctcttggagcagcgcgggttatggtaaatcgtgacgttgttcattattacattccttgaaaaaatcatcctaaacgcatcaggatttctggtatttacgaaaacgttcgttcaattggcgcaattggtcgatgcgagcatcgtaacgcgcctgcttcagactgcccaattttacccgtgcgctggcatcgccaagtaagccaatcgcctgtggtagtttgccactcagcgccagactttctgcccgcgcagagagttcttcatctcgcaaaccttgtgctgcagaggcttgagccagcaaatcccagccgttgggatcgttcggatgggcgaaagtgtagcgatacagaattcggctagccgccgctggctgctcgccctgtacgtaagcattggcgaggttaagctgtaagactggctcgttattttggctggcaatggctttctctaaccgggcaatcgcctgcgcgtttttattctgccccaaatcaatgtcggtcattaaatcgataaaccagatattgtttggctgttgggtcagcaatggctgcagcacattacgggcgctatcatatttcttagcctgatagaacaagattgcctgaccgtatttggccgcgagctgttcccgcgtggtgcctttgcttagcgtgtccagcaaatccgagctaaggctgtactcggtggaaccatacatccccagaatacggactttggcaaacagataatcctgtgatgaggccactgggtgcggcttcatttggctggcgcggttacgtgcgtcggagagacggctatccggcaaggggtgagtcagcagcatttccggcggtttggaggcatagcgtgattgatccgccagtttctgcataaagttcggcatggcctgcggatcgaagccggcgcgctgtaacaccacgataccgatgcggtcagcttcctgttcgttaccctgagtaaagctgatgataccctgctgggtacccgccagcgtgccgctcagccctgccataccggcctgcgggctggccatggtcaaaagtatcgaacccagtacgcccacccaggtcagcggagccattcgctgctgttcttccatcgcacgcgccaaatggcgttgagttacatgggaaatctcatgggccaacaccgatgcgagttcgctttcgttatccgtatagcgaaacagcgccgagtggagcaccacgttgccgccaaagaaggcaaaggcgttcagttgatcattattgacgataaagaagtgaaaaggggtgcgcaccgagttggcgttggccaccagtcggtttcccaactgattgatatattgagtcagtagtggatcggcgatcagcggcgtgctggcacgcatctggcggacgtaaaaatcgcccatcgccaactcctgattaatactgagagtgccgccggcggtggtgccgatatccggtaacagatcctgcggcgtttcggcagaaacgggcgcgatcccagaatagagcagggtagtgagcaatgtggcgatcactgttttacttaacagacgtgtcataaacgagactgcccctactgaggtaatgacgattttgacgcctgtgatgcgtaagagttcttcttccctgctctgctctccagtacaatcatcacgaacgcgtgttggatcacaaataagcgatcagaaatctcaaaagctctgtccttggctttgtgtcgagattgtctgttatcttagctagctcaccagcacaatggaacttttgcctagcaatattcttagttttactcattaatgctctcccctgtgcttaaagggccgcaaaagaaacctgtatttcgcaggttcgtcatggttttcaaggagcaatctctgatgttagagatgttattacagtggtatcgccgacgttttactgacccacaagtcattgcattgctggttattttactggccggattctgcattctttattttttcagcggcattttagctccgctgctggtggctattgtgttggcgtatttgctggagtggccaacggctcgtttgcaacgcatcggctgttcgcgactgtgggcggccagtatagtgctgattttgtttggcggtatcgccatgctgttggtgttggtggttgcgccgaccgcgtggcagcaagggattaatctgatttcggatatgccgaaaatgttgaatcaattcaatgcgtacgctcagaccctaccgtcacgctacccggcactggtggatgctggcatcgtggatatgatggcggaaaatatgcgcggtaagctttccggcatgggagactcggtcgttaaattctcgctggcttcgatagttggcctgctgacattggctatctatctgattttagtgccgctgatgctgtttttcctgcttaaagataaagaacagatgctgaatgcggtgcgccgggtattgccacgtaaccgtggcctggcggggcaggtatggaaagagatgaaccaacagattaccaattatattcgcggcaaagtgatggaaatggtgattgtgggtattgctacctatctggtgttctttatcctggatatgcgctacgcgctgctgttatcggttttggtgggtttctcggtgctgattccctatattggcgcggtgattgtcactattcctgtggtgctggtggcgctgttccaatggggtatcggtgccgatttctggacgctcatcgtggcctatctggtggttcaggggctggatggcaacctgctggtgccaattttgttctcggaagcggtgaatctgcatccgttggtcattattctgtccgtgattattttcggcggaatgtgggggttttggggcgtattcttcgcgattcctttagcgacgctggtgaaagcggtgattcatgcctggccagaagagtttattcctgacgctgattaatgtcggcgaatacccaatattacccataaaaaagagcgcctgggcgctcttttactttatctgaatcctatttgttggcagacaaatcaggcattttgctgtaggtaagccatcacgatatcgtggtgattggtggttttgaagttatcgaacacgtgttcgaccttaccttcgctgtcaatcaggaaactgatgcgatggatgccgtcataggttttccccatgaagctcttttcgccccacacgccaaactgttcagcaacctgatgatcttcatcagaaagcaaagtgaagttcagcaactctttttctgcaaagcgagaaagtttctcgggtttatcggtactgatacctagcacttctacaccggcgtttttcaatgtatccatgttgtcacgcaggccacaggcctggacggtgcaacccggcgtcatcgctttcgggtagaaataaaccaatacgcgttgtccaaggaagtcggccaaactaatttgctcaccgtcttgatcgggcaaactgaattttggcgcaatatcaccggctttcaatgggctcattactaactctccattcggtcgtcatgctgtgggtagttcacaacgctaatactgccctgcgcattgagttctgtacatagctgatgaaaagcttgttcaataatagaactgttttggctggcagggctgtgggcgctgatctgaatatgtagcaaaggcgaattattgccctctgccggctgggtttttgagaccagttccgcaatgttcatattgtgacaatggaacaggttagtgaatcgctcaataatatgtggggaatctttaacttcaacctttacccagacggtagcaggcatggcttgctgatcctgcgcgttagtgcgtttcatcacaatcagtaaatccagctcggcccctttctgcggcaaagtggactcaatcagagtgatggcgttccaactaccggagagcaacatgatgaatgtgaactcttcaccgaacatcgccaagcggctatcttcaatattacaaccgcaactgctcacatggcgggtgatagtgtttacgatacctgggcggtctgcacccagtgcggttatgaccagataatgttcatcaagctgcggcaaagtcgctcttcctgtgtcgctctatggggttaccatggtaaacataaaaaaaacctgctgccaagcgcttacaacacagttgtttacttgcttttggatagaggtcaaaagtaccatgaggaacttgtttgtggaggagatggccgatgtttacgggaagtatagttgcgctggtaacgccgatggacgacaaaggtgctgtcgatcgtgcgagccttaaaaaactgattgattatcatgtggccagtggaactgccgctattgtctccgtcggcacgacgggtgagtctgcaacgttgaatcacgacgagcatgcggatgtggtgatgatgactttggatctggccgatggccgtattccggtcattgcaggaaccggcgcaaatgctacctcggaagccatttctcttactaaacgttttaacaatacgggcgtcgttggctgtttgaccgttacgccgtattataatcgtccaatgcaggaaggtttgttccagcattttaaagctattgctgaaagtaccgatttgccgcagattctctataatgtgccttcgcgtaccggttgcgatatgttgccggaaacggttgcacgtttagctaaaattaagaatattgttgcgataaaagaagccacggggaacttatcgcgggtaagtcagatccaagtgctggttgatgatgaagatttcatcctgctaggcggcgacgatgccagtgggctggactttatgcaactgggtggtaaaggcgttatctcggtgactgcgaacgtagcagcccgtgaaatggcacagctttgtgccctggcggccgcaggcgatttcgctgaagcacgccgtttaaatcaacgcttgatgccgttgcatcagcatttatttgtagaagcaaatccaattccggtgaaatgggcctgtaaggcgctggggttgatggcaaatgacactctgcgtctgccgatgacgccgctgactgaccctgccaagctggtagtggaaaaagcgttgaaaagcgccggtttgctgtaactcttagggaaatttgatggcaatatcattgcaaaagtcgatggtggcaaaggttgtgggtgtttcgttggtcatgctgctggcagcttgtacaacggatcaacgctataaacgtcaggttagcggagatgaagcctatctcgatgcgccggcgctcaagccgcttaacgcacctgctggtatgattctgccgttgcaaaacggtgattttgatattcgtgaagttcgttctactggcaacgtcggcaaggctctggacattcgtcctccggtgcagccgttggcgctgttgagcggttcgcgcacggaatatactagcgataccagcaagctgttgttagaaagtagcccgcagaatcgtaacctttggagccaggtcacccgcgtgattcaggataagaatctgccggttgccagccgtcaggatgcgaatcaaacgctgactaccgactggatcaagtggagccgcggcgatgaagacgtgcagttcgaaggccgctatcaggtgagcgtcgtagagcagggttatcagttgtcgctggtggtgaaatcactggaactgcagcagggggggaaacccgtcaccgaatatagcgctattcagcgttataacggcgcaatgctgaacaccattattgaaggtctggataaagtccgtaccgacgctgaaaacaatcaggccgctcgcaaagtgggttctctggatgttcaaagcggcagtgacgataccggcttgccgaacctgatcgtccgtgtaccttacgccacgctgtgggaacgtctaccagctgcgctggagaaaatgggcatgaaagtgagcgaccgcagccgtccacagggtaccgtggccgtgacctacaaatctatgagcagcagtagctgggatgcgttgggtgcgaaagatccggagctgaaagaaggcgattacaaacttcaggtcggcgatcttgataaccgcagcagcttgcagtttattgatcctaagggccataccttaagccaatcgcagaacgatgcgttggtggcggtgttgcaggccgcgttcagccagacgagcgcaaactaaacaaaggggcttcggccccttttgtctttgtgtttattagctatatcgggcggtgctggaacgatgcggcgcggctctgtaggtaaagttaattttgttaacattcgttttgttaatgccagttttgtcaacatagtcattctttatcaaagattgtcacactattggagtaataagatgcaaaagctagctgagttgtatcgtgggaaggcgaagaccgtctataccaccgaaaatcctgacctgttggtactggagttccgtaacgatacgtcagcactggatggtcagcgcattgagcagttcgatcgtaaaggcatggtcaacaacaagtttaaccatttcattatgaccaaactgcaagaagccggtatcccgacccaaatggagcgcctgctttctgataccgaagtgttggtgaaaaagttggatatgattcccgtagaatgcgtgattcgtaaccgtgccgccggttctttggttaagcgtctgggcattgaagaaggtctggaactgaacccgccgctgtatgatttgtttctgaaaaacgatgccatgcatgacccaatggtcaatgaatcttactgtgcaacctttggctgggctagcgaagcgcatttggctcgtatgaaagaattgagctacaaagcgaacgacgtactgagcaaaatctttgacgacgccggtctgattttggtggacttcaaacttgagttcggtttgttcaacggcgaagtggtgttgggcgacgagttctctccggatggcagccgcctgtgggacaagaaaaccctgaataagatggacaaagaccgttaccgtcaaagtctgggtggtttgattgaagcctacgaggaagttgcgcaccgtatcggcgttaaattagactaaccgcgcaatcgattacgttgtttttccaatctcgttaatcaggggagagcgttcgtttctcccctctatttctgtgtttttgattaaaatcctgccatttctttcttacgacactatttttaatggtattcatccatatgattttctacgatgagtggaaagtctgttctggagtaaagctatgcgttggcaaggtcgtcgtgaaagtgacaatgtggaagatcgtcggggagcttcatctggtggcggcggtggttttcgcccaccgattggaggcaggggcgggctggtaatcctgattgtggtgctggtagccggttattacggtgtggatctcacgccgttgctcaacggcagcgatccgacgcagcaaaccaaccagcaatccagtgcgccaattagcccgaaagatgagcaaatggccaagtttaccaaggttgtgctggccgataccgaagatacctggaaacctattttccagaagatgggcaaaacctatcaggatccgaaactggtgatgtatcgcggcgcaacgcgtaccggttgcggtactgggcaatcggttatggggccattctattgcccggcggacagcaccgtatatatcgacttatcgttctacgaagagatgaaaaataagctgggtgctggcggtgattttgctcaggcttatgttattgctcatgaagtagggcatcacgttcaacatttgttagggattgatgccaaagtacgccagcaacagcagggagcctctcaggttgaagctaaccgcctttccgtgaagatggaactccaggccgattgttttgccggcgtgtggggcaaagcgatggatgagcaacaggtactggaagagggtgatttacaggaagctctcaatgctgcgcaggccatcggcgacgatcgtcttcagcaaaagagtcaggggcgagttgtgccggatagctttacccacggcacatcccagcaacgttacacttggttcaagcgcggttttgacagcggtgacccaaacagttgtaacactttcgccagccgctaaaatacttcatcgctgcgtgacagcatgattctccgatccttgccggcgcattagcgaccggcatttgttttttgaatattttactttttgactacattgcactttgactaaaaggtagggatgaccatggctacactcgatcctacattgctaatcctgctgggattggctgcgttgggtattatcagtcacaacatgacggtaacgctggcgattttaaccttgctggccatccgtattacgccgttgaaccagtattttccgctagtggaaaaatacggtttaaccatagggatactgattctgactattggtgtgatgacgcctatcgccagcggacgaattagcgccagcgaggtacttaactcctttgttcactggaaatcgattctggcgatagctgtcggtatcggagtgtcctggctgggtgggcgcggggtgtctttgatgacgcatcagccttcggtagtcgccggactattagtcggcacagtattgggcgtagcgctgtttaaaggtgtgccggttggcccgttaatcgccgctggcttgctgtcactggttatcggtaaacaataacgtgattgacactctggttgccttacagccgcagatggtgcagcagggcatacgccgtttggtggtattgagcggttgcgctgactggagccgccaacaggcgaaagcgctgtatcagcgattaggcagtggcgtttggctggctgaacaggggccggattccgctgaaatgattgctccattatcggcaaaaaccttattgggacaggagcgcctgcacggctttttcgatgctacccaagggttgaatatcgatgcgttggcgattttggctggaacgttgcaggcgggaagctggttggttttgctggtgccagagtgggaaaactggccaatgcagccggatgaagacagcctgcgctggagcgagcttacgcagccgattgccacgccgaatttcattcgtcatttgcaacggcatatgttggctgatgcggaaaccatagtgtggcggcaacatcaggtggctcaaccgccgcagtttgccaagcgtgcaacctggcaaccggcaacgggcgcgcctactcaagagcagcgggcgattttgtatgcgctgttgcgttctgaggctgatatttgggttgtgaccgcgcctcgtggccgtggcaaatcgacgctggctggaatgctggtaaaccagtggccaggtgcctgttgggttacggggccgactcggtcagccactgaaatactcaatcactgcggcgatagaaaagcacaattctgggctccggatgcattattgcaacaccttgaaactgaagccaatcatgacgcagactggctgattgtcgatgaggccgctgcgatcccgacgccgcagctatccgccatgttagttcatttcccacgtgtattattgatcagtaccgtacagggttatgaaggtactggacgtggatttttgctgaagttctgcgcgtcgttacctcactggcaaggtttcactttaaaagatcctattcgttgggcaaataacgatccgttagaaaattgtttggaccgcgcgttgctgtttaccgatccgatcgccactgactcagccggtttggtaacgatccgtcgttgccagcagcaggattggctcaacgatcccgatcttttagccgagttttatggtttgttatgtagcgctcattaccgaacttctccgctggatttacgacgtttgatggacgcgccgggaatgcatttttccgctgcggtgagtgctgggcaggtgattggcgcgttatggttggtggatgaaggtggattaacggcggaattagcttgggaagtttgggcgggacggcgtaggccgcgaggcagcttggtagcgcagtctctggcggctcacggaggactgtggtgggcgccgacgctgcgttctcgtcgggtgagtcgggttgcagtgctggcgcaacggcggcgtgagggcattgcgcgacaaattatcgctgaagaaactcggcgggcaaaagatcaaggtgtggattttctctccgtcagttttggttttaccgaggatttatggcaattctggcagtcctgcggttttgaactggtgagaatcggtagccataaagaggcaagcagcggttgctacgcagcaatgggaattttaccgttaacatctgacgcggtagcactatgtttggcggcaaaggagcaactggctcgcgactggcgctggttgcgtcgttggatagatttgacgttgcctttccccgattgcgcagatacggctctcgatgaaaatgactggcaggaactggctggatttgcctttggtttccgcccgatagaagccagtctggcggcgttgaaccgattgttactgcacagtattttgccgctaccggcattgcgacaatatttacaggaaggggtgtctactgcggagattagccaaaacctgaaacttagcggacgaaaagcgctggttgcccgttggcgggaagaaactgcgcttggattgagtgaatgggatgtggcgttgacgggtcggtggcaggaaagggtaaagggggagtaggttttgatcttagtccggcgagccagagctagattcacctgcgggcgttatcagagcgccatgccattcccatcattgcaataaatggaataactcattcaagaaaacccgatattcatctcgtcgcagcggcgtatagtatttctatcgctacctgaatacaggggcaccttttcggctccgtagagccagtatttattgaattaaggagtatcctatgaaccacgagcatttcgttgtacaaagccccgcgacaccggctgagcagctgattttgctctttcacggtgtaggagataatccagtcaatatggggcagatcggcagctattttgctaaagaattcccgcaggcgctggtggtcagtatcggcggacctttcgccagcggcctggttaatggacgccaatggttttccgtgcagggtataacggaagataaccggcaggcacgtattgatgaagttttaccgcagtttgtcgcggtggtacgccactggcagcaacaaagcggactgggcgcgcaggccacggcgctggtcggtttttctcaagggtcaattatgtccctcgaagcggttaaagcggaacctcaactggctgggagagtagtggcatttagtggacgttttgctaccttgccggagcaggcgccaaaagatacggttatccatctgattcacggcgaagatgacaatgttatcaacgttgaacaaagtaaagcggcggcgactcgtttagccactttaggcgcagatgtcacgctagatttggaggaagataatggccatgcgattaatcagggcatgatggattccgcactggaacgcctgcgttactatgtgccccagcattattgggatgaggctttgtccggtaaacgcggtgaactcatcgctttccgataagctgccaaaaaaatagggcaagcgtctgagaatatcgcgcttgcccttttttatgcttaataatcagaacgctagctgttttatcctatataaagaatgatcgcaggctactttttgttcttattatccggccagtcatcgtcgtcgtcccattgagcattattatctcggtgtggcggtaactccggcttattgctcaaaaacttcttatggtcgagccgacgcagctctttgatcccattcaaaataatccctaccagcaggatcagtacaatccaccagtaatctgctaaccattgcatgggcgcactcctttggttgtcgatatgaaacgcgagaataccagtggtaaatggctggcaagccactcaataccggcaacgtcctgttgttgccaggcttcaagcagcagttctggcgtgagtaaatgctcagcctggtccgccaatggtcggtagcttaaatgccatggctctaccgctacgccgccgctgtcttcaacgaaggggcgatagaagccaaaattggccatattggcgctaagccattgggttaaagaataaaaatatccgccagcttcatattcccaaggctctaactgtagtttttccccttcgggcagcagggtcggatcgtaaatatccaaatcgctgccccagtgatgacgactggcacccggtaatgctgaccagcgcagaatggcctcacagcgttcgcccgcactcattcctgaaatatccagcggctggctgttgtgatctaatactggccgctcaccgcggaatttaccattccagattgctaattgtcgttcaaaatcccgaaaggtactagcgggttgcagattcagaccagcgtctttagccgcctgctgcatagcgagaaacgcttttacggcctgaggttgcagacggtgattcccactgagcggaaccagatgctcacaggttttgccggtcagcatttccggggtcatcatgcgatcaattgttccataatgcgttgatacatgcggctaagtaactgcaaatcagccgcgttaacgcattcatttactttgtgaatagtggcgttaaccgggcctagttcaaccacctgtgcgcccatcagtgcgataaaacgcccatcggaggtgccgccggtggtcaatagttgaggcgtcacctcattatacaactctaccgcgttcaccaccgcatccactaaagctccgcgtgcggtcaggaacggctgaccggaaagcacccaatcgatgctgtaattgagttgatggcgctccagcaaagcttcgacacgctgccggatgagcgcatcggtcaattcggtgctgaaacggaagttaaactgaacgtaaagttcgcctgggataacgttgttgctgccggttcccgcttgcacgttggcaatttgcatactggtcgccgggaagaattcgttgccttcatcccattgagtggtaaccagttcctgcaatgcaggcatcgcgcgatgcaccggattatccgccagatgaggataagcgacgtgaccttgaacgccatgaatacgcagattggcggtgattgacccgcggcggccatttttcaccacgtcaccgacgcgttcagtgctggatggttcaccaaccagacaatagtccagccgctcgttacgtgccatcagcgtgttgaccactttcaccgtgccgttaatcgccttcgcttcttcatcggaggtgatcataaaggccagacgccctttatgattcggattagcggcgacgaaacgctcagcggccactaccattgcggcgagtgaacctttcatgtcggcagcaccacggccataaagcataccgtcccgaatgaccggatcgaacggcggattagtccaatggctttcatcgccggtgggcaccacatcggtatggccggcaaaagccagggtttcgccttcaccgcgccacgcccagaaatttagcgtatcgccaaaattcatcggttcgacggtaaaaccaatcgcctgtaggcgctggatcatcatctcctgacaaccggcatcttctgggctgagagaggggcgacggattaactgttgggcaagttcaataacggggcagctcatcttaacgcacctctgcaaaaaactgttgatagctctcaggtttgaaaccgagcaaaatgccgccgtttgccgcttccagcaccgggcgtttaatgattgccggttgttccagcattagagccttggcggtatgcgcatcgaccacggcggcgcgctgcgcttcatccagtttacgccaggtggtgccgcgagtattcagcagggattcccagcctaaatgttcgataaaaccttgcaaaagcgtatcggttaatccgtcaacgcggtaatcgtgaaacctatagggaatcgcgttgtcttccagccagcggcgggcctttttaatcgtgtcgcaatttttaatgccatagaggctaattgggggattttccgggctatctgacataaataacaatggcctctacaaaattatgggcaaatgagtgcgggtaaacccaaaagttgtatggaacctcggatttaggctacatcacataatgcggcaaaatgccctgtgaatccagacggctattgtcgtattccctcaatggggtatttcgcgcaggttgagccggagagggttgccatttcagtttatgtcctgataacgtagatccttatttcggtgcttgtttagatagggatattaatatgcagggaatattacgcttttgtgtttttttcggatgttgtatgacgatgtttacagccagtgctgccgggccagatggcgtattttcgctgattgatcagcgtttatcttatatgaaagatgtcgcgggctataaggccgcccatcatctgcctattgaagatttagcgcaggaaaaacgggtattgcagcaggtgatggatgaggctgaaagaaaggggattgatcctgaatcgattaaacccttctttatcgcttcgatggatgcggctaaggcgattcaatatcgttatcgggccgagtggttatctaaaccggcaaagggatgggaactacgcagcctagataaaatccggcctgaaatcgccaatttaagtaagcaattgatcgcagaaatttattcgctactggcttccggtcaaaccattgaacagagcgaacggccacgttttatggatatcgtgcatcagatgaatttgaatgataatgataaaatgcgtttattctcaactctacggttaattaaactgagtcagaaataatgcaattgccaccccgttgcgggtggcgtttcttagattagccatttattctctgcatcagccaatccgatccaagtctgctgcgtactgtcgaattgcccgttgatataggctgatttctttatggttagaggtttctgccagaagcaatagcaatgaggcgacagcgtctttggtttcgcccagattatataacgtcatggcgcgaaatagcgttatctctttggcatcagggaattgcgttaatgccttttcgaatacatccagcgattctttatatagacccagagtacggtaggtactgcctaatcccagataaactgcctgtaattcttctgcgcccagatggttgtcaatggcggtcagataaaatggaatcgcctgcatttctaaaccctgaacgtcgtacaacgaggcaattttatgcagcaggctaccgttatggggatcttcaaccagtaatttgaatgccaaagtcatggcatcgtcataacggcccagtttttccagagaatctatggtgtgtttcatggcatatggcgcgttaatgtgagaataacccgcacgctactctgtcgggctgaaacaggcaagcctgcatgtgtaataacctgagttatttcaatatctccgccaacgaaattatatcctaaatgattagtctattatttcgcctttatttgttcgaaaactaatcgtataatcacggcggttattagagaggacattatggttgatgtagagttaaacacatggaaagagtttatcgagtcaatgctgagtaaggcataattcgataaatgagtaatagcggttgatgctattttgtatgacttagatttacccagggagcgagtgactcgctcgcaaaaaggcaggttctcaaagaatctgccttttttatttgggtcacggcacgtttgatatgaaagctattttagatgtcgtcaatattattcacgttatccgatgaataacttatcaaataacaataactttttagtcgacattaataatgtggttttctccgctgaatgtattacttcctctatttattaggaaataatttagcaggggattgttaaggaaaatttaatattgattaatcattcactcatacaatatcgttatttttttctgaagatgtggcgccaatcaattcactgaaatagtgaacgattggcgcaatcattgtgaatgaataaagaattagtgctcatcagcctgattaggctggctcccacgaatcggccttcccgggaaacgacggcgaaccaaaacaaagaataatggcacgaagaagatggctagaaccgtcgctgaaatcatgccgcccatgacgccggtacccacagcgtgctggctgccagagcctgcgccctgactgatagccataggcaatacgccgaagataaaggccaatgaagtcatcaaaataggtctgaggcgttgacgcgaggcctccagcgtggcttgaaccagatctttgcctttgttatttaattcattggcaaactcgactattaaaatggcgtttttggccgatagcccgatgatagtcaacaatccgacctggaaatacacatcgttttccagcccgcgcatccaggtcgccgcgacggcaccaatcacccccaaaggcactaccagcataacggagaacggaatagaccagctctcatacagcgctgccagacacaggaacaccactaataacgagatagcgtaaagcgccggagcctgtgaaccggacaggcgttcctgataggacatgcctgtccattccagcccgaaaccattcggtaactggctcaccagcttttccatgatgtccattgcagcaccggtactgacgccttgggcggcttccccgacaatttccagtgcggaataaccgttgtaacgctcgagacgcggcgagccaaattcccagcgggtagtggcaaaggcagagaaaggcaccatgccgccgctattattccggacataccacttattgatgtcttccggcagcattcgagcggtagcttccgcctgaacgtaaactttcttcacccgtccgcggtcgacaaagtcattcacataagttgagccccaggcggttttcagcgtgttattaatatcatccagcgatacgcccagtgcctgagccttgcgttgatcgatatcgatttgcagctgcgggctgtcgtccagaccgttatgacgaactcgcgtcagctctggctgtttggccgctagctgtaacagttcatcccgcgcggccattaatttatcgtgcccctgaccgccgtggtcctgcaattccagatcaaagccagaggagttgcccagacctgaaattgctgagggactactggctgaaaccttggcttcagtaattttgttaaaagcctgggttgcccgctcaataatggcaaaagaagaatcctgactgttggatcgctgatcccagcttttcaaacggacaaacaggcgagcaacgttttgcccgttaccgccggggcctgaacccacggtagaaaacaccgatagcacgttatttttttcttccgtcaggaggtaattctccactttttccactactttcagcgtttgttgctgagtggaaccgacgggtaactgaacctgagccataaatacgccgcggtcttcctgcggtaaaaacgaagtcggtaacttgaggaataaaaacgccaggccgccgagtaagagtaaataaaccaggatatagcgcaggctatgatgtaaaacccgagcgacgccgttttcatagcgtttcgcattgcggtcaaacatacggttaaaccagccaaagaatccacgtttaccgtgatgatgcccggctacgaccggtttgagtaaggtggcgcacagcgctggcgtcaggatgagagcgactaaaaccgacagaaccatggcagaaacgatagtaatagagaactgacggtaaatcgcgccggtcgtgccgccaaagaaggccatagggataaataccgctgaaagcaccagtgcgataccgactaacgccccttgtatctgccccatagatttccgtgtggcttctcttggtggcaatccttcttcgctcatgacgcgttcgacgttttccaccaccacgatggcgtcatctaccaacagcccaatggctaataccacggcaaaaagggtgagggtgttaatgctaaacccgaaagccgacaaaatggcgaacgtccccaataacactaccggaacggcgatggtcggaattaaagtagcacggaaattttgtaaaaacagatacataaccagaaacaccaatagcaccgcttcaaccagggttttgactacgtctttgattgaggcttgtacgaaaggggtagtttcgtaagcgattttggcttccagcccgtgggggaagaacggagccagttcggcaatacgcgctttcacgagcttatcggtttgtaattcattggcaccagaggccagtttgatacccattcctgacgcgggctgcccgttaaaccggctgagataatcatatttctctgcacccagctcaacttttgcgacatcgcctaaggtcaccaatgagccgtcttgattcacccgtagggtaatttcacggaactgttctggggtttgcaattgggattgagcgttcatggtggcattcagtgcttgattatccaccgaaggcgtaccgccaagctgcccgacggcaatctgactgttctgggatttgatggcatccacgacatcctgagtggttaatcggtagttagttagcttggaaggatcgagccaaatgcgcatagcatattgggaaccaaaggcatccacgctgccgacgccttcaatacggctgattggatcttgcaggttactggccacataatcggcaatatcctgtttatccatgctgccgtcggtagagacaaacgcgagcatcatcagggtattatcaccagatttagagacgttaaccccttgttgctggacatcctgcggtaactttttaaccgcagactgtaactggttctgcacctgctgcatggcttcatttggatcggtgccggcctggaaagtcagcgtgacgctggcactcccggcattactgctctgggaggacatatacagcaggttgtccaggcctgtcatgctctgttcgattacctgagtgacggtgttttcgagcgtttgagccgacgcacccggataactggcagaaatccgcacatttggcggagccagattaggatactgttcgacgggtaaagagaaaatggccaacatcccggtcaggcagagaattatcgctaacacccatgcaaaaatggggcgatcgatgaagaaatttgccatgtagcgggaacctcgttaagcgtgaccttatcactggaataggaaaaatattacttttgtgaatctgtcgctactttacgtgtgaatcagtgatgaaacgtggagaaaaaaaggagatagtgtaaaaaaacacaaggtcgcttttttttgctgccttattgctcataactcgcgatatccagaggttatttctcatcgcgcagattgatgtccggcggtttggcgtcgaacagcaatgtcgcctgagaacgtccttgaaccaaaatagtatctttaaacaggatataactatggaactcaatccggtattcgcccggcgactttatctgtgctggttacttagtgtaagtgataagcccaatgtgccgcgattaatggcgttaaccggctggccgcggcgcaccttgcaggacgtgttgaaagccttgccggggctgggcgtcactttaacctttgttcaggacgggataagaaataatgacggtttttactgcctggaaagctgggggccgctgaataaaaagtgggtgctggagcaccataaagtcattttagcggccatagagtagccccggttgaccggggttagtctcagtggcgcttgttttccagatacaaaatggtggcggcgacccgtgaacgcacattcagtttacgtaacaggttacgaatatgaactttcaccgtttcttcggaaatatgtagctcgaaagctacctgtttattggacatgccgcgcgcaacttcctgaagaacatccaattcacgctcggttagttctgcaaagggattaatctgttcgtggcgagaggagagatactcttgcacttcttcgctgaacacgctttctccctgagcggcctgccgcaaatgctccagcagaatttctggctcgctgtcttttaacaggtatccgtcggcgccggcgtcaatcatggcgtacacgtcgctgcgggcgtccgaaacggttaatacgataattctggcgccaatgccgtcgttacgtaacgctttcagcgtgtctaagccgttcattcccttcatattcaaatcgagcaaaataacgtcgggtagagtttgactggccaattccaatgcttcttcgccgttattggcttcggcgactacggtaaatgccgtttccagttctaacagctgcctgatgccgcgacgcattaacggatggtcgtcaacaatcataatggtgtgatttgtcgtcatgataggtaatgctccctgtagccagtaaaacgtaccgcaacaggcaaggttatgccgattccggtagcaagattatggtggaattacgtggtgatagccgaaaaacctttagccaacctaaagtggattctttttattgcgtaacctggaacccattacgctccgttaaaacggtacgatccgctatttattgtaccgcaaccgccctgaatattataaacctgttctgctttaattcatgatttctgtctatataacacggtaaaacggttattaggtgattaattttatatgcatacagttatgcgaattatttaataaataagatcaccttgattattctatttgataaataaaataatcatgaaaatactgatcgtgctcatcttggcttaatcttgattcagccgttagttaaatcgttatgtaaaaatataaataacgcaaatcggttaaagcaggagggaaaggacaaataacgctggaaataattgatctggcgcaatctttccctctgattaactctaaagggtaattatgtttttaccaataattgggtatctactgttaccaaactagggaaaccatttagtggtaatacgaataataataattatcaccattttgattttccggccagagcagccgggtcctatttgctaaaccacataataatctggaagcaattaggtatttaaataaatggcaagcagtgttgccagcaatgtcaagggtatcagtatggccgatttgtcccgacgccgattgctttcagggcattggcggcgcaatgctgaccattcgtcttccgttatccggccgccctggtcggttgccgaagctgagttcacggctggctgcacgcgctgccacgcttgtatccacgcctgcgaaaccggagtgcttattgccggccgcggggggttccccgagatagatttccaacgtgccgaatgtactttttgtactcattgcgtaaccgcctgcgaggcaccggtttttacctcgccggatcgcgaaccgtggcagttgaaagccacattctcggcaagttgtctgccttttaaaggcatcgaatgccgtagctgtcaggatagctgcgaaagccgggcgatcggattccgcccgcgtttaaacggcattgcccaaccagaattagagatcgacgcctgcaacggatgcggagcctgtgtgcccggatgtccggtacaggccgtgactcttacccggagcgaagatggaagataaagaatggcatgtttgcggtctggtggtgcaagccaaaccggaacgcattccccggttaatcgacgagttactcgcgattccgggaacagaaatacccaccagtgacgcccaacagggaaaactggtggtggttatgcaggcagcgcgctcagacgtgctcctgagacaaattgagtcagcgcgtaatttgaccggcgtgctggttgtgtcgctggtatatcaccagcaggatgagcaaggtgaggaacaaccatgaaactcagtcgtcgggacttcatgaaagccaatgccgcagtggccgccgccgccgctgcggggatgaccatacccaccgtggccaaagccgtggtgggtggtgcagatacgattaaatgggacaaagcaccttgccgattctgtggtaccggctgcggtgtactggtggggacgcaaaatggccgtatcgtggcgtcgcagggcgatccggattcacccgtcaaccgtgggctgaactgtattaaagggtatttcctgccgaaaatcatgtacggcaaagaccgtttgacccagccgctgctgcgtatgaaagatggccagtacgataaagaaggcgagtttactccggtaagctgggaaaaagccttcgatatcatggagctaaaatttaaaaatgcgctgaaagaaaaaggccctaccgccgtgggaatgttcggctccggccagtggacaatctgggaaggctacgccgcgtctaagttaatgaaagccggtttccgctcgaataacctcgatcctaacgctcgtcactgcatggcatcgtccgtagtgggttttatgcgtacttttggtatggatgagccaatggggtgctatgacgacattgagcaggccgatgcattcgtgctgtggggctcgaatatggcggaaatgcaccccattctgtggtcgcggatgactagccgtcgtttaaccgatcctaatgttaaaattgccgtcctttcgaccttcgaacatcgtagctttgagctggctgacaatccgattgtcttcacgcctcaaaccgatctggtgatgatgaattacattgccaattatattattcaaaataacgcggtagatcaggatttcctcgatcgtcacgttaatttccgtcgcggtgccaccgatatcggctacggtttacgtccgactcatccactggaaaaagcggcgaaaaatccaggcagcgacgcgtcggagccgatgagttttgaagacttcaaagccttcgtggcggaatatacgctggaaaaaacctctaaaatgagcggcgtgccggaagatcaactggaagcgctggcgcagctgtatgccagtccaaaagtgaaagtggtttcctactggaccatgggctttaaccagcatacccgtggcgtgtgggcgaataacatgtgctacaacctgcacctgttaaccgggaaaatctccaagccgggctgcgggccgttctctctcaccggccagccttccgcctgcggcactgctcgtgaagtgggcactttctctcaccgtttaccggccgacatggtggtgaccaacgagaaacatcgccaaattgctgaaaccaagtggcaactgccagccggtacgatcccagagaaagtcggtttgcacgccgtggctcaggatcgcgcgctgaaagacggcactcttaatgcgtattgggtgatgtgtaataacaatatgcaggccgggccgaatatcaacgaagaacgtatgccgggctggcgtgatccacgtaactttatcgtggtttccgatccttatccgaccatcagcgcgctggccgcagacctgattttgccgacgtcaatgtgggtagaaaaagagggcgcatacggtaacgctgagcgtcgtacccagttctggcgccagcaggtgccatcaccgggtgaggccaaatccgacctgtggcaaatggttgagttttccaaacgtttcaaagtggaagaagtatggcctgctcaattgttggatcagaaaccggagtatcgcggtaaaacgctgtttgacgtgctgtacgccaacaacgtggtgaataaattcccattaagcgaaattccggctgatcagttgaacgatgaagcgcgtgattttggtttctatatccagaaagggctgttcgaagagtatgccgattttggtcgcggccacggtcacgatttggcacctttcgatcgctatcatcaggagcgaggtctgcgctggccggtggtggacggcaaggaaaccctgtggcgctaccgggaaggtttcgatcctttcgtaaaagccggagaaagcgtgcgcttctacggtaaacctgatggcaaagcggtgatttttgcgctgccttatgagccagcggcagaaagtcctgatgaagaatataacctgtggctgtcaacgggtcgcgtgctggagcactggcacaccggttctatgacgcgtcgggttccggagctgcatcgtgctttccctgaagcggtgctgtttattcacccgctggatgcgcgagcgcgggatctacgccgaggggacaaagtgaaagtcatttcccgacgtggtgaagtgatttctctggtggaaacccgtggccgtaaccgtccgccgcaaggattggtgtttatgccgttcttcgatgcggcgcagttggtcaataacctgaccttggatgccaccgatccgttatccaaagaaaccgactttaaaaaatgcgcggtgaaattggaaaaggtttaaccctgatacccagcctgctgtcggagccgttttaaggcacgcaggccgatttagggaaagatgaagtgtctttcgggagccaaataatgaacaacaaaatgtttaagtcgtttagccgctggttggtgctagtggcactgattttgggcggagcggcttatgccgccagcaatgtcgaaatggatttgagccaatcgccggaggtgtccggaactcaggaaggcaaggtaaaaatgcctaaacaacaacagcgtatggcgctgaactatgttaaccaaccaccgatgattcctcacagcgtggagggttatcaggtcagcaaaaacaccaatcgctgcttacaatgtcacggcgtggaacattatcgcaccaccggtgcaccgcgcgtcagtccgacccactttatcgatcgtgatggaaaagtatcgagcgaagtttcgccgcgtcgatatttctgcctgcaatgccatgtgccgcaaacggacgcggcgcccattgtagaaaacaccttccagcctgcaccgggctttggtaaataaccgaggtagttatgacagaggaaaaaaaaccgggtgtgatccggcggttatggcagtggtggcgcaggccgagccgattggcgctagggacgttactgctgatcggttttgttgctgggattattttctggggtggtttcaacaccggaatggaaatggctaacaccgaaaagttctgtatcagttgtcatgaaatgaaagacaacgtgtaccaggaatatttgggcactattcactacagtaaccgcagcggcgtcagagccacttgtccggattgccacgttccgcacgaatggggcccgaaaatgttgcgtaaaatcaaagccagtaaagaactgtacgcgaaaacctttggtttgattgatacgccgcagaaatttgaggcgcaccggctgacgatggcgcagagtgaatgggcgcgtatgaaagccaataattcgcaagaatgtcgaaactgtcataacttcgacaatatggatttcaccgcgcagaaaaccgtggcggccaaaatgcataatagcgcgattaccgaaggcaaaacctgcgtagattgccataaaggtattgcccataaactaccggatatgcgggaaattcctaacggcttttaattccctcctcgtatctgagtgctgtatttttcaacacctcgctggcttttgctgacgaggtgtttttttattgcaaagttatctccactagcgttagctagcgccaggaaaaaaaacttcaattacatgatacggactgaatatatgtcagcaaaaatcgagaatatccaacgcacgttattatctgataattggtatgtgctgaataaatattcttacgacttaaaaagaaaaaacggtgagttagtccatcaggagcgtgaagtctacgaccgaggcaacggtgccactatcttgttatataaccgcgccaaaggaaccgtaatattaatcaaccaatttcgtatgcctacatatgttaacggcaatgaaagcggcatgttattagaagcctgcgctggtctgttggatgcggatactccggaagactgtattcgcagggaagcgatagaagaaaccggttttgaaattggcgaagtggaaaaactatttgctgcgtatatgtcacccggcggcgtcaccgaactggtgcatttctttgctgcggaatatctgccggaacagcgtatttatgccggtggcggtattgatgacgaagatatagaggttctggaaattcccttcaaagaagcgctggcgatgattgccgatggtcgcatcaaagacggcaaaaccatcatgctgctacagcatgcgcagattaagggctggtttgaatgaccgaggcacttttcaacaaattcatcttatgtaagtaactaaagcgtaaaatgttgcgaagagtttgggctgcttcatggtttaggcctattgactcactatactggttctgttcctgattttacctctcaacatataaaagcaaaagggatcctataatggacgaacagttgaaacaaagtgccctggattttcaccaatatcccactccgggtaaaatccaggtctcgccaaccaagccgctggccacgcaacgagatctggcgctggcgtattctcctggcgtagcggcaccttgtctggagattgcggccgaccctttggctgcctataaatatactgcgcgcggcaatttggttgcggtgatttctaacggcactgcggtgctggggctaggtaatattggcgctttagccggaaaaccggttatggaaggcaagggcgttctgtttaaaaaattctcaggtattgatgtttttgatattgaagttgacgagcataatcccgataagttgatcgacattatcgcctcactggaaccgaccttcggcggtattaatctggaagatattaaagcgccagagtgcttctatattgaacaaaaactgcgcgaacggatgaacattccggtattccacgacgatcagcacggcactgcgattatttgtactgcagctgttctgaacggtctgcgcgtagttgagaaagatatttctgatgttaggctggtggtttccggggcaggggctgcatccattgcctgtctgaatctgctggttgcactggggctgaaacgtcacaatattacggtttgcgactcaaaaggcgttatttatcaaggtcgcgaacccaatatggaggcgaccaaagccgcgtatgccattacggataacggccagcgtactttgggagatgccattccaaacgccgatattttccttggctgctccggccccggcgtattgacgcaggacatggtcaaaaccatggcccctaatccgttgattatggcgctcgcgaatccagagccggaaattttaccgccgctggcgaaagccgtgcgtcctgatgcgataatctgtaccggccgttcggattatccgaatcaggtgaataacgttctgtgtttcccgttcatcttccgcggcgcactggatgtgggtgccacagccattaacgaagagatgaagctggcctgcgttcacgctattgccgatctggctctggcggaacaaaacgacatagtggcttcagcctacggcgaacaagacctgtccttcggccctgaatacattattcctaagccttttgacccacgcctgatcgtcaaaatcgcccctgcggtagccaaagcggccatggactctggcgtagccacgcgtccaatcgaaaatttcgatgcttacgtcgagaaactttcagaattcgtctacaaaaccaacctgtttatgaagccgatcttctctcaggctagaaaagagctgaaacgagtagtcctgacagaaggggaagaagaaagagtattgcatgcgactcaagagcttgtttctcaagggctcgcattccctattctgattggtcggccaagcgttattgatatgcgactgaagaaactggggctgcaaatcgttgcgggtaaagactttgaagtggtgaataacgaatccgatcctcgctttaatgaatactggcaagagtactaccagatcatgaaacgccggggtgtttctcaggagcaggcgcgtcgtgccgtgattagcaatacgacggtgatcggttctattatgctgcaccgcggcgaagccgatgccatgatttgcggcaccatcggcaattatcatgagcactattcggtggtggagaaagtcttcggtttccgtgatggcgtacacgtggctggcgcgatgaacgccttgttgttgccaaccggtaatacttttatcgctgatacctatgttaatgacgatccaaccccggaagaactggctgaaattactttgatggcggcagaaaccgtgcgtcgtttcggtattgagccaaaagtagcgctggtttctcattctagtttcggtactgcggattgcccatcagcccgtaaaatgcgtcgtactctggaattggtcaaccaaatggcaccgcagttggaaattgacggcgaaatgcacggcgatgcggctttggtggaaagtattcgccatgacctgatgccggacagtccgttgaaaggtgcggctaatgtgttgattatgccgaatatggaagcagcgcgtatcagctacaacctattgcgcgtgacctcatctgagggcgtaaccgttggtccggtattgatgggcgtggcgaaaccggtgcatattttaacgccgatcgcgtcagtacgtcgtattgtgaacatggtggcactggcggtcgtcgaggcacaaactgagttgctgtaatacttaatcacgttgttgaaaatcagagcctttgtctatcgagacagaggcttttttatcgattttatttttccacatcaatgaaacattcttgttctattattggtacgcaacaaattgtaaatgattatcattatctatattatgcggacgattaaaccgctaaatggataacgcctgctaatgagaatcttattattattcagtatgtttttaatgattagctgtacttctacgcctcctaaaaatattccgagcgataaatccgatattaccgccttcggaaccattaccgatcttcataccggaaaagtcctgacggcctcccagttagtggatgagctggcgggtgctcctcaagtgatcgtgggtgagaaacacgataatctttatcaccatcaaatcgagcggtggttgatagaaaatctggcacagaaacggccacagggcagtgtattgctggaaatgttgaatccgaaccaacagatcaaggtggataaggttaagtcctggctacagcaagagcctcgtgttagggaaagtcgaattgtggagctgctggcttggcagccgggctggagttgggcgctgtacggcgatctggcaatgacggtgatgcgtgcgccttatcccgtgtggtcggcgaatttggatcgagatgaaatcatggcgatctataaggaaaaaccgccgttagagggcaaattttctaccacgccagaagtgcgcgcggcgctggaaaagctaattcgtgcgtctcacgataataaaattgatgcttcgcaattagcttcaatggtggccattcagcagcagcgcgaccgccgtatggctgaacgtttgctggccgcgcccactccaacactattaattgccggcggttatcatgcggcgaaaaatattggggtgcctttgcatatgcaggatcttaaagcggcttcacacccgttggtgctaatgctggctgaagagggcgctaacgtagggccagaaaatgcagattatctgtggtctgtaccggtaaagactttaccgcgctaagaatgtcgccgagcgaaaaaacatcgccacgttaagaatttttccttatccccgcgcaacaaatgcgacattttatgtcgcattattcatttatttgcactgaatctgaaaagagactgttaatttcatttacaaatgattatcattgtcaaatataattgataatcatttgcattctaatcattccatgcattcactgtatttatacgatcaacctttaccaaagccgaaagttggccaaggttttgttctggctatcgctgctcatctcgcagtgtcgtggttgatctttcgcgttgctgaaaccttgcctccgttacctttgccgcctcccgcagtgatgatgcaatggtcggcgcacattgaagcgccagctacgccgaaacctttgccaatcggtgagcagcagacagtctcatcggcggcttctgaaccccagaaaagcgtagagaagcagccggagttaccgaagctggccagagttgaaaaagccaaaattatcgtggctgaaaataagcctgagcctagagtgcggcaaaaacagcccaagccggagaaacctcaggctattaccagcccaactgcgttggcgtctgctgccagcagtgctgccccagtggcacaaagtcagccttctgaacgcgttgccgcgccgataaatagcgatgccaacgcaaaagtggaagccaaaatttcctgggaaagtttggtaagagggcatcttaatcgttttaaacgttatcctgccgaagcgcaggtacgtaaccgaactggaaccgtcttggttgaatttactcttgattatcgtggcaatattcttagcagcaaaaaaataaactcatctggtacacaatccctcgatcgtgaggcgatgagaatgctggaaaaagcgcagccactgccgataccgccagaatcaatattgtatcaggggagacttaccgtcacgcttcctattgattttagtttaattaatcaacagtaatatcactgattctaattgttaaataaccctaggtgaggtcatttgtcttttgatgacccggttagctacagaatttgtagtaaataaaatagacagtatttaattatatcagagggactatgagatattttatatcacctaagattaatgcgggtaattgcttaataccttcgattatttatctcggtttattcagtttctccttatttgcaggtgcggctgagatggctgagccaacgccacctattgcggaaaaacatccacatcaattaactctacattcagaaactcgcgtcgataattactattggctgcgagatgacgaccgcaagaataaaaaggttattgattatctgaaggctgaaaatagctacgctgaatctatacttaaaacaaccactaccttgcaagatacgctatatcaagaaatgctgaagcgagtaaatcagcaggatcaatcggtaccttatagtcttaatggatatcgttaccaggaaatctatcaaccgggtaaagagtatgcgcagtaccaacggcagagggaagtgcctgatgctgaatgggaagtgttgctagatgccaatcagcgtgcgcaggggcatgattactataagctgggtgggctgagcgtcagccgtgataatcagcgtatggctgtggcggaagatacgctgtctcgtcggcaatacagcatccatttaaaacagattgccgacaaacaatggtctgatgaggtgattcatgacacttcgggcaatatggtgtgggcaaacgataataacactctgttttacgtacgtaatcatccgcaaactttattgccgtatcaggtttttcgccatcaatacggtacgccagcagaaaatgatgtcttggtttaccaggagaatgacgatagctattacctcagtttatcgcccagcacttctcgccagtatattttgataaatatcagcagcaccgcgacttcggaaacccggttactggatgccaatcagccacagcaggcaccaacggttttctccgcccgccaaacgggacgtgaatactacatcgatcattttaacgaccaattttatattcgctctaatcatcagcatcctaattttggcttgtatcagactgtatccggggaagcctcttggacaacgctgattgcaccggaagattctaaagacgtagagaattttgtgttattccgcgattggctggtggtcgctgaacgggagcagggcttaactcatattcgtaaaatcaattggcagagtcagcaacagcagccgttgaccttagaagacccgacttatatggcgtggctggcctataacccggagccagatagccacgttctgcgctatcgctattcctcaatgaccacgccgacctcaacttatcaatgggatatgattagcggagagaaaactctgctgaaacaacaggaagtaaaaaactttaatcgcgatgagtaccaaagccagcgtatctgggttacggcccgcgatggggtgttggttccggcgtcgctggtttaccgtaaatcattatttaaaaaaggccataatccactactggcttacgcctatggggcctacggcatgagtatggacccttcgtttagcgcgaaccggctgagtttattggatcgcggttttatctttactttgattcatgtgcgcggcggcggggagctggggcaagggtggtataaacaaggtaaactggcgaaaaaagaaaacagtttcaatgacttcatcgatgttactcaaggtttggtacagcaaggctttggccagccggagcggttgtatgccatgggcggtagcgccggggggctgctggttggggcggtcattaatcaggaacccactttatttaacgcagtagtggcgcaggtgccttttgttgatgttgtgacgactatgtcagattcctcgataccgttaaccaccaatgaatacggggaatgggggaatcctgaaaagttatctgattataaggtcatgcgagcctatagcccttacgacaatatctctcctaaaaattatcctaatttattagtcactagcggattacatgattcgcaggtgcaatattgggagccagccaaatgggtggctaaattacgagagtttaatcggggagataatattattttattaaccacggatatgagtgccgggcacggtggtaaatctggtcgtctcagtaggttgaaaaatagtgcccaggaatacgcctttattttagcaatggacgaaaaagtaaaataattccacataaaaatgtggggtaaacaagtaagaaaataataagaataaaatccagagtattcatattgggtatgaatgctgcacggctatttgaacgctataacacgagcaagtttttaatacggaattttaaattaatttcttgagggatttatgagagttaatctagtggtaaaaataatgggagccggattggtttttatcggattgtcagcaataactcaggctgaaactgaatcggccaataccaaggaaagaatggtattcagcccgttaacggtgtcaggagcaaaaacatcgcctgaaaacagtgcgttggaaaagccaggcgcattcagttctcgcggagaaagcaaagacctgcaatcaatagattcggtgattagaagcatgccgggcacctcaacgcaaatggatcccggtcagggaaccgttagtgtgaatatccgtggtatgaccggctttggtcgggtgaatacgatggtggatggtgtaacgcagagcttttatggcagtgcgcctaacccctataaccatggacagtccccgaccacccaattcggtgcacttatcgaccctaactttatcgtgggcgttgatgtggttagaggcaatgccatcggcgctgacggcgtgaatgcgctagctggtagcgccaatttccgaactatcggcgtggatgacgttattttctctggtaatccctttggcatcagaagcaaattctcgttgggtaataacggtattggtcgcagcggaatgattgctattgcgggtaaaacagatgcttttaccgataccggcagtattggcgcgatgttagcagtgagcggcagcagtattgacgccagttataaaaatggcgatggggtgatgagtcaggaatttggtagtgacgaaacctttaaacaaaatccgcagtctcagttaattaagctgaatatcaaaccgaatgagtttaatgacatcgagctatctggccgagcttataacaataaaatcagccgccgccacattaacagcgatgacttttatattaaatacaactatacaccgttctccgagctgattgatttgagcgtattggccagcgtcagccgcgggaatcaaaaatatgactccgacgcattgaacaaatttaccaactcaagtgctaaaaacagctcagacgcgattgatattaataatgtcagcaaattcagctacgctgatacggattttgccgtcaaaatcggcggtaaattgatgaatactgagtattacaagcatattgaaactactgagccggataataaaacagcaggagaaatactggagaacaacgtgttcgcaccgggcggcagacaggatatctctagtctgtataccggactgcaaataaatcgcggtatttatcaggctaattttgatctcaattacactgaagctaagcttaaaggtttcaaacccgcctgcgacgatcgcatccgctgtttcccgcagggcagcgcgaacattaatttaagtgaacatggctttaatccgagcgtgctgctgtcggcggatattgtgaattggttccagccttttgtcagctatacccaatcaatgcgtgcgccaaacgtgcaggaagtgttttattccaatgagggaggggcttcgatgaacccattcctgaaaggtgaagaggcagaaacttatcagctaggttttaactccgccagccaggggctgatatttaaagatgactcgctgcgttttaaagcggtttactatcgcagcaagattaaaaactatatttccagccaatcttatatgctgtgtgggacgggccgcgtttgtacgttggatcaaatgactagcgaggattggagtacaaccgacggtaactttaatctttacatctacaccaactcactcacgccggtcagaactcacggttttgagctggaagctaattatgacgccggattcttatttagtcgtctgtccttcagcaaagagaataccgaccagccgacgtctatcgccagcggtgttttcggcgcaggcgacaacgctgaaatgccggataaattcttgacgctggataccggactgcgcttcttggatgaaaaattaacggttggcaccattgttaaatataccggcaagacccgcaggatgagccccgcgttagattacgacgaatatgacggaagattgatgaaagaagaaatgtcgaatattccaaccattgtggatatttacagcaattatcaattaaataaaaatgtgatgctgaaagtttcggtgcagaatttgatgaacaaaagctattcggattcgctaaataaactgaacgcgatgccgatgcagcaacgggaagaaaacccaaataatactgccagaggaagaacctatttgtttggcggcgagatacgcttctaacataattagccctgcggttggcaccgagcgcagggcgattattcaaacgcctagccgttttttttctttgcctgctgtagccacttatccagttcattggcaaactgctggcgatcccgttgatttaaagtattaggcccgccggtttgaataccgctggcgcgcatggtatccataaaatcgcgcatatttagccgttcacgaatagtatccggcgtataacgctcaccgcgtggatttaaggctattccccctttttcaatgacctctgcggctaacggaatatcggcggtaatcactaaatcaccaatttcaactcgttgtacgatttcgttatcagctacgtcaaatcctgatgcaacctgtagggtacggataaattttgacggcggtgttttcaacggctgatttgcgaccaaagttaccatcatgccaacgcgatctgccgcgcggaagagtacttctttgataacgttcggacaggcatctgcatcgacccaaatttgcatcagcaggtttctccgtttgtttcatttgcccattctctgaccggcagaaaatcgcggtaaagcacggcttccgggctatcaggctccggttgataattatattcccaacgcaccaaaggcggcagcgacattaaaatagattcagtccgtccgccggtttgcagcccaaacagcgtgccacgatcccacaccagattgaattcgacgtaacgaccacgacgataaagttggaactgacgctcacgctcaccccaaggcagggttttacgacgttcgacaatcggcaggtaagcatcggtaaaacctttgccaacggcctgagtaaaggcaaaacaggtcgaaaaatctggagtgttcaagtcatcaaagaacagcccgccgatgccacgagcttcgttccgatgtttgatatagaaatagtcgtcgcaccattttttatacttgccgtacagatcttccccaaaaggctggcataacgctttagccgtttgatgccaatgcaccgcgtcttcttcaaagccgtagtagggggttaaatcgaaaccgccgccgaaccaccaaactggctgttcaccgggtttttcggcaataaagaagcgaacgttggcatgactggttgggatgtaaggattgaggggatgaatgaccagcgaaacacctagcgcctgaaagctacggcccgccaactctgggcggtgcgcggtagcggaggcgggtaaggtggcaccagacacatgagagaaattcacgccggcctgttcgaatactgtgccattaaccattacccggctgcgtccgccaccaccttcctctcgttcccactgttgttcggtaaaactggcctgaccgtctgcctgcgcgagtttggcgcaaatgtcatcctgtagtgataagagaaaggttttgataatgtttatgtctggtgtattcatcaggattatattcactggcttgggagtgttttaggccgctaagtataccctgattccagcctatagttgtaccgtcagtgtgggttcggtttatgactgctaaggaaaccgaatatcgttgcctactacgaaaattctgcctgaatccgttattatcgtcggtatcgacctcggataataggtgcgtcagcctgagccaactctcttaactatgtgtatccgtatcaatttattattgcgcgtgtagataatcccgcgataatcagaacatcaactttaattaacagcggcgaacactgatggaaattcgcgtatttcgacaagatgattttgaagaggtaataactctgtgggagcgctgtgatttattacggccgtggaacgacccagagatggatattgagcgcaaactgaaccacgatccggatttattcctagtggcagaagtgaatggcgctgtcgtgggctcggtgatggggggttatgacggccatcgaggttccgcatattaccttggcgttcatccggacttccgtggccgcggcattgccaatgcgctgatcagtcgccttgagaaaaagctcattgcccgcggctgcccaaaaataaatatcatggtccgcgacgataatgatgcggtgctgggtatgtatgaaaagttggattatgagattcaggacagtattagccttggcaaacggctgatcgtcgatcaagagtattagcggtgagtaagtcggaagcttaaaaataccctatcccgctgaattgatctgagggatagggcgttcaattatggcaatttggtaatatttctcacatcaacttctactgaattccagtctttatccacctttccttcgatttgtactttatctttcggcgtgatggtctggcctttccaacgtttggcgtcaatatctacggtgatcgtgccggtattgtcgcggaaagtgtagttatcgtggctcaaacgctcttcgatataaccttgtaaagtgacgcgagtgtcgtcacgcatggatttgactttatctacggttgtgattgccgcgcttgggccttggaaaccgccttgggttgcgggctgagtttgggttgttgacgggccctcaaagccaccggtagttggagtagtggtggtttgtgctaatgccggagtgctacataaagccagaaatgttgctgctgtgatgaacttcttcacgttatcgctccttcaatcaataaatgattatgtccgatagccggggaaatctcgtcctttgagtcgccgataataaccagaccgcaaaaaatgcttaaatatcgcgacctgagcggtcattatagtttaggaatataggttggcaataatccgatggctgcaaaatgaagagcatctgtgaagataagtggccgattaatatggcgggattacgaaaatatgagcttctttggtgcgactgtcataccgaggggctgtgactacggcacttttttagcaaactgaactccaaccagtgaatcattgagcgctgttctactgaaacgggctttgtctgtgggccgaaagcaagtgattatcggtatcaccgtttttgtcagttaattttaaggagctataccatgaatttacgcccgttattgcttgggttgccaatattgctgacggggtgttctgcgctctcaaatttttcttggtcgagcctgtctcccacgaattggtttggtagtagcctgcgggtgaccgaggaaggcgtagggagtattactgccgccacggcgatgaatcaggatgcgattaacgaaggtctgaacggcgattaccgcttacgcagcggcatggctggcaatggcgatagattaatttctttttatcaggcgatgaaggacgctcaggttaaactgattatttcaggccagcctaaaggcactgtcgaacgcattgacgttatggacaaaaatatttccagccagtggggcgtaaaactggatacaccatttagcgatatctttgagcaggcttatggtgcctgccagaaagctaccggtgatgatgccgaaagcgtagagtgcgtggctccagaaagtaaacatgttagttacctgtttaccggcatttggcatggtccggaaggattaatgccatcaaacgacgcactgaaaaactggaaagtgagtaaaataatctggcgtgctcaggctcattaatcttagccgtaatgggattattttaacgtcgtaaaggctcctctgtcggagcctttattatttctggggaaaaatcacggtggtagccgcctgctagcattggggctattcctgttttattttgcgctgacgcaatgtaataattaaggcgtcgcgtatgatgtcgaacagaatataaagttgggggaagaaccccaactcccagtttttattgaggaagaaatcatgtctcaggttcagagcggtattttgttggaacattgccgttttgctatttttttggaagcaaaaattcagggtgaactggatgacatccgtagcggttctaaaatattctgccaatcgttggtggagttacaacaacaataccctgatgcacatttaggcgcggttattgccttcggttctgacgtatggcatgacctctccggcgggcagggcgctgctgaactgaagccttttgtgccgttgggacgaggtttggcaccggcgacccagcgtgacatgctgatccacattcagtctctgcgccatgatgtgaacttctctctggctcaggctgcactggccgcattcggtaaaactattgctattgaagaggaaacccatggtttccgttgggtggatgaacgagaccttaccggctttattgacggtactgaaaacccgcagggtgataaccggcctgaagtcgcggtcattgccgaaggtgaggaagacgctggcggtagctacgttttggttcagcgctatgagcacaacctgagcacctggcagcgccaaccgcaggaaaaacaagagcaaatcattggccgcaccaagtcggatagccaggaactgccaccggatcagcgtcctgatacctcgcacgttagccgggttgatttaaaagaaaacggtaaggggctgaaaattctgcgtcagagcctgccttatggtactgccagtgggaaacacggtctgtatttcatcgcttattgcgcacgtttacacaatatcgaacagcaattgctaagcatgttcggcgatctggatggcaagcacgaccagttgctgcgttttagtaaggccgttaccggcagctattatttcgcgccgtcgctgactaaactgctgtcgctatagttatagtattttctgcaaaaaaacgtataaaaaagccggattgctatttagcaccggctttttttatagctcaatggcagtggtctacatatttcttgggaagattacagcgccactgcgtcacgcattctgttcagcacagtttgtttttgttctttagttagagcacgtaacggcaaccgcggattaccagcatcaataccgtgtaattgcatcgcagctttacctgcggctacgccacccaactctactagtacacgaattagcgcaatgacctgatccatacttctttgcaccgcagcatggttaccagcgttgaagtccgcaatgattttatggaacagtggagccgcgtaattataagtgctgccaacggcaccaatagcgccaacagccaatccgcccggcagatgttcatccacgccaaacggaatatcaaacttgccaccgctaacccgtaggcagcgttggaattcatacagatcagcattattgaatttaatgccggacaggttaggaattttagactcggctttaattaagaactgttccatatccaaattcacgccagacatcccggaatgataatagtaaaagccttttgacggagccgccgctgcaattgtctgacaataggcaattaaatcatccagattacctggcttgaagaaacaggggccaatggctgaggtcgcgaaaatatccagttcttccgcatggcgagacaaatccaccgcatctttaatactgagagcgcctgtgtgcagcgtaatgctcaattgtccctgtgcggcagcaacccagcgctcggcaatttttttacgttcttcaacggagcaatgaataccttctcccgtggtgccgcaaacgtaaacaccttttacgccatcattaatcagatgctctgcaatctggtcaatgaccgggtaattgacttcaccgtgctcatcaaacggagtgtgcggtgcagcgataaggccggttaactttttcatacttatccttaaactcgaagagatagcagggggggagtttgtttatggaggataactccgccgttaaaattaagcacgtcaggaagactaacgctgcttgatggcatcggtgaaccagccgcagatatgttcaatgcgggtgatggcggagccgacggtaacggcataggctcccgccttaatcgcggcggcggcgagcgccggtgaattatagcgaccttcggctatcacccggcaaccgacctgagccagttggtttaccagcgctaaatccggctcagacggcgtatttttcgaggtatagccggataacgtggtgccgataaaatcgacgcccaagcggtgagcgctgataccgtcggtatagtcagaagcgtcggccatggataaacgaccagaagctttaattcgttcaaacagcatttccaccgaaacggggcgctctcggtgggttacatcaaaagcgataatgtcggctccggcggcaaccaatgcatccacatcttccagccatggggttattctgactgcgcagcccggcagatctcgcttaacaatgccaataatgggcgcatcggtcacttcacgcaccgctttcacgttggcggcaccttcaatacgcaggcctacggcaccgccgtccagcgcggcttgcgccatggcggcaatcatttcggggcgatccatggcgccgttgggaaccggttggcatgaaacgattaatccgttctggagctgatggcggaggtggattggattgctcacggtttttaactccggtattttatcttaaatgaagttttactccatcatgttagatcttttattcgacgggcgcaacgactgaacgagcaaaatgtgaacccgtaggaaagggtgccagtcccttttcctttggccgcattttctgtttgcctattagagtgagttgagatagtttcattcgaagtaaaactccattttattttatttttcggagtgtgatcggtgggcgtagaggctgaggcacagagaggcagcggtatgaagcagggcttggtactggatattggtggcactaaaatcgccgccgcgcgagtgaatcacaaaggcgaactgagtcaacggcagcaaattgccactccgcgaggagacgcagaacggttgcaaagaacgctggaacaattgattgaaccccatcgacaacatgttgattttgttggtgtggcttcaacggggattgttagtaatggttatctcacggcgctaaatcctgccaacctcggtggcttagctcattttccactgcaagcttgtattgaaggcatcgcgaatgtgccttgtgtgctgctaaacgatggtcaggccgcggcgtgggcggaatatcagactttgtctattgccgtgaataatatgatgttcgtgacggtttcaaccggcgtgggtggcggtattgtcctgaataataagttacataccggtaatcaaggattggccggccatattggtcacaccttggccgatcctcacgggccgatgtgcggctgtggtcgacgcggctgcgtagaaagcgttgcgtccggtacggccattggcgcagccactgctgcctgggctgagccggtcactgccgttgaggtatttcgcatggcaaaaaatggccagcggcaggcagaacagattattgacgattcagcggcagccattgcccaaatggtggcggatatgaccatggctctggatctggaaatggtggtgatcggcggtagcgtggggttagccgaaggctatctcgatagagtgaggctggcgcagaaaacgttaccggccatctatcgtgcgcctttgcaggcggctcattaccgccaagatagcggtttatcgggtgcagcgctgtgggccacagccacgctgtaatcaatagtgcaacctagtgacgaataattaagattatccgttgggatataaggcataaaaatgattcacggtaacttaaatcagcccgaattttttggcggctatccggaaagtattcaaatgatactggcgtatttgtcggaaataccggttaacgaattgtcctgcggtcgtcatgatattaacggcgaggatatttttatgaatgtgatggaatttgacactcagccagcggaaagtaaaaaagcagaaatgcatcttgtctatgccgatgtacagctgctcattcgcggtgtggaagggattgaatattcaacccaaacgccatcagaacatctggagccttatcaggctgaggatgattatcagcttattgccgaaattccggataaaagccaattacgtatgctccccggtatgtttgcggtattcctaccgggtgagcctcataagccgggctgtcaaattatcggttctggtacgattaaaaaactggtggtgaaggtgcattgccgcctgctggacgacactctattatcctgatttccctataataagaaccttagttatctttgacattttccccggccccccggggttttttattgtttctaccgccgctctccggcctcatttgtcttcacgaagcctgccaactatgtaatcatgcccaccaaatttaaactcaccctgaggtgtttgtgatgaaaacgggtactccacgtttccagcctggaaaaattcttgatgccttgggggcgatgcaaaatagcctgactcgttctgctcagcgtattgcggcctatattctgacggagccggctaaagtgactcaggtttctattgctgaattatcctcattaactcaaaccggcgaagccaccattattcgtttctgccgcacgctgggctataagggattccatgatttcaaaatggatttggccatcgaagttgcaaccagcaatgcgtcaaataatgaaaatagcctgttagacgcggatgttcaggatagcgataataccctgactattggtagtaaattgcaggtggcaattaataatgtgttatcagaaaccctgaatttgctgtcgctggaatgtgttgaaaaagtggttagcttgctgcgtccggcagacagaatctgtatttttggcgtagggtcttccggtattactgccgaagacgccaaggcaaaattaatgcgtatcggcctgcgagtcgatgccgcaaccaataatcattttatgtatatgcaggcttcattaatgaaagccggtgatgtcgctattggtattagccattcaggtacttctacagagaccgtagaggcattgcggctggcaaaacaggccggagcgacaaccgttgccttaactcataatatggggtcgcgcattaccgaactggccgattatgtattaatcaatggcaaccgtcaggggcaattacaaggtgactctatcggcaccaaaattgcccagttatttgtgttggatctgatttatgccttattggtgaaagctgatcctgagcaggcggagagtacgaagcgtaaaaccactctcgccgttagccagaacggataagctgcaaaaaaatataatctcctttgcaaaacgcacttctcccgtgaataagccatctctacgttatatctacggtggcttatttggttcttcccggtaatacaaacatttcgccatctttgtcacgttttctacacattgtgattgaaaagagagagtgatcttatacactcaattggagttttactcctttttgtgttttatttcggggtttaactgcaaaaaacataagcgtagctatcagcgcaattagctgctttaaatatgcgttaaaacaatgagatgctgattgttaaacgcgtggccgggataatagatttccgtcagaggcttatcaatgacgggggagaacgccttaatatgaatacttcaatacagcagcgctggtataaacagctgacgcctgctcaatggaaggcatttattgccgcatggatcggttatgccctggatggctttgacttcgtactgatcacgctggtgctgaccgatataaagcaagagtttggtttatcccttattcaggccaccagtttaatctctgcggcatttatttcccgttggtttggcggattagtgctgggtgctatgggcgatcgttatggtcgtaaattagccatgattaccagcatcgtcctcttttcctttggtacgctggcatgtggtctggctccgggttataccaccttatttattgcccgactgattatcggtattggtatggcgggagaatatggctccagctcgacttatgtcatggaaagctggccgaaacacatgcggaataaagccagcggcttcctgatttccggtttctccattggcgccgtattagccgctcaggcctatagctatatcgttcctgcttttggctggcggatgctgttttatattgggttgttgccgattattttcgctttgtggctacgaaaaaacctgccagaggccgaggattgggaaaaggcgcagaatcaatcggctaaacagaaacccgctaaatcgctaaatatggtggatatcttgtaccgcagtaacctcagttacctgaacattattctgacggtgtttgccgccgcagcgctatatttctgcttcactggtatggtttcggcacccgttgtggtggctctgggaattttatgcgcggcaatatttatctactttatggtgcaaaccagtggcgatcgctggccgacgggcgtgatgctgatggtggtggtgttctgcgccttcctctattcctggccgattcaggcgctgttgccaacttacctgaaattggagctgggttatgatccacatactgtaggtaatgtgttgttctttagtggctttggcgcggcggttggttgctgcgtcggcggttttctgggcgattggctggggacgcgtaaagcctatgtagccagtttactcgtttcccaattgctgattatcccgctgtttgccatgggtggcgggaatattatgctgcttggcgcggtgctgtttttacagcaaatgctggggcagggcattgcgggactgttaccgaaattattgggcggctatttcgataccgagcaacgcgcagccggtttaggctttacttataacgtgggggcgctcggcggtgcactggcaccgattctgggcgcgtctattgctcaacacttgagtctgggaactgcgctgggatctctatccttcagcctgactttcgtggtgattctgctcattggttttgatatgccatcgcgcgttcagcgctggattcgtccgaaaggattgagaatggtcgacgccattgatggtaaagctttcagcggtgccaagggcaatgccacggcgcagccagtcacgctgaaataatccctcgcgcgtgaggttaaccacggcgctttcacaaagtctggctgatatcagccagactttcttatttttgtcagtcgcggggaagaggcggttttgctgccttagagcatttcatacttgcacatcactaaacggtatataaaagcgttacagctatatgcctagttataaatacactgatcatcattaaggcgttatcagcccggcgaactcagtgactaaggtgcagaatgaaacagaacttgatgaaaaatggcaggctggccggatggtcaaaagcggctctgttgagcgctttggtattgggcagcgccacggtttctgccaccgagttactgaacagctcttatgatgtttcccgcgaattgttctccgcgctgaatccgggtttccagaaacagtgggaagctcagaatcccggcgataagctgaccatcaaacagtctcatgccggctcatccaaacaggcattggctattttgcaaggtctgaaagccgacgtagtcacctacaatcaggttacagacgtacaaatcctgcatgatcgcggcaatttgattccagccgattggcaagcgcgcttgccgaataacagttcacctttctattccactatggcgtttctggttcgcaaagataatccgaaaggaattcacagctggaatgatctggtgcgtgaagacgtcaagctggtgtttccaaatccgaaaacctcgggcaatggccgttatacctatttggccgcttggggcgcaaccagtcaggccgacggcggtgacgatgctaaaacccgcgactggatgaaacgtttcctgaaaaacgtggtggtatttgataccggtggccgtggcgcaactacgacttttgtggagcgcgggctgggcgatgtgctgattagcttcgaatcagaagtgaacaatattcggaaagaatacggcagcgacaaatatgaagtcatcgtcccgccggtggatatcctggcggagttcccagtggcgtgggtagataaaaacgtcgtgaaaaacggcacggaaaaagccgcgaaagcttatctgacctacttgtacagccctgaagcgcagcaggttattaccagctttaactatcgcgtttatgacaaaaccgccatggctgcggcgaaatcgcagttcccggaaacccaattattccgcgtggaagaacagttcggcagttggccgcaggtgatgagcacccatttttccagcggcggcgtattggataaattgttagcggaagggcaccagtaatgttgtcggcgtccagcaagcgggttctgcccggattcactcttagcctcgggagcagcctgctttatacctgccttatcctgctgttacctttgagcgctctggtgatgcaactggctcaaatgagtctggcgcaatactgggaagtgatttccaatccgcaggtggtcgcggcttacaaagtcacgctgttggccgccggcgttgccagcgtgttcaacgccgttttcggtatgctaatggcgtggattttgacccgctatcagttccccggccgcagtattcttgacggtctgatggatttgccttttgccttgccgacggcggttgctggtttaacgctggccacgctgttctccactaccggttggtacggtggttggctggcacagtttgatatcaaagtttcttttacctggctggggattgcagtagccatggcttttaccagtttgccatttgtggtgcgaaccgtgcagccggtgttggaagagttagggccggaatacgaagaagcggcagaaaccctgggtgccactcgttggcagagtttccgtcgggtggtcatgccggagctggctccggcgctgctggccggtactgcgctatcatttacccgcagtttgggggagtttggcgccgtgatttttatcgccggtaatatcgcgtggaaaaccgaagtgacctcgctgatgatttttatccgcctgcaagagtttgattatccggcggctagcgccattgcctcggtgattctggccgtgtcattggtgttgctgtttagcatcaataccttacagagccgctttggtcagcggattggggggcactgatggcggatatttcagaatttaacggtggtgctgttcgcccgcctttcaactggggaaaatggacgttaatcgccattggcgcggtgttttccattttgctgttagtgattccaatcgcctggatttttatcaccgcgttctccaaaggaatagaggtggtagggcagaatttagccgatccagacatgctgcatgctatttggctgacggtgttagtcgcgctgattaccgttccggtgaatctggtgtttggcgtcgtgatggcctggctggtgacgcgttttcagttccccggtcgccaattattgatgacgctgattgatattccctttgctgtctcgccagtggtagcgggtctgatgtatttgctgttttacggttccaacggcgtggctggcggctggctggatgcccatgatattcaactgatgttttcatggccgggaatggtgttggtgacggtatttgtcacctgcccatttgtggtgcgggaactggtaccggtgatgatgagtcagggcagccaggaagatgaggctgcagtattgctgggtgcttccggttggcagatgttccgtcgcgtcaccttgccgaatatccgctgggcgctattgtacggtgtggtattaaccaacgcccgcgccattggtgaatttggcgcagtctccgtggtatccggctcaattcgcggtgaaacctacaccttaccgctgcaagttgaattgctgcatcaggattacaacaccgccggtgctttcactgcagcggcgttactcaccctgatggcgatagttaccctatttctgaagagcggtctgcaatggcgcttagcgcgtcaggttgttcgcctcgaacaggaggaaaagcatgagcattgaaattaacaatatcagcaaatattttggtcgtaccaaggtattgaacgacatcgcgctggatattccttctggtcagatggtggcactgctggggccttcgggatcgggtaaaacgacgttgctgcgaattattgccggtctggaaaaccaaaatgccggacggctgagtttccacggtactgacgttagccggctacacgcgcgggagcgccgggtgggttttgtgttccagcattatgcgctgttccgccatatgacggtgttcgacaatattgcgttcggcctcacggtattaccgcgccgcgagcgcccaaatgcgacggccattaagcacaaagtcgaacagctactggaaatggtacagcttggtcatttggcgaatcgttttccttcccagctttccggcggtcaaaagcagcgagtcgctttggctcgcgcgttggcggtagaaccgcagattctgttgctggatgaaccttttggcgcgctggacgcgcaggtacgtaaagaattacgccgctggctgcgtcagctgcatgaagagctgaaattcaccagcgttttcgtgacccacgatcaggaagaagcgatggaagtggcggatcggattgtggtgatgagtcagggcaatattgagcaggtgggcacgccggatgaggtatggcgcgatccggccacgcgttttgtgttggaattcctcggtgaggttaaccgattaagcggtgagatccgcggttcgcagctttacgttggcgctcaccactggccgctggatctggctcctatgcatcaggggcgcgtcgatttgttcctgcgcccgtgggaaatggaaatcagtactcaggccggcgctcgctgtccgctgccggttcaggtactggaggtcagcccgcgcggccacttctggcagttaaccgtgcaaccgataggctggcatcaggaacctatcagcgtggtattaccagaaggtggcgtagctgcgccagtgcgaggcaatcgctactacgttggcggattgaacgcgcgactctattctggcgatcaattactgcaacccattgctatggcgcaaagcgcctgatagtttttgctcaccgcatataatcaggtggcctattggccgcctttttgctttgtccgaacgtggcgtaaaactcatgccatcgggcacttttattcgcttaataggttaataatgtgacaaccctggaacagtgtatcggtaataccccgttggtgaaattgcagcgtctgacacaagggctgaacgccgatgtgtgggtcaaactggaagggaataatcctgccgggtcggtaaaagatcgggcagcgctgtccatgattcagcaagcggaattacggggtgatattcatgatggtgatgtattaattgaggcgaccagtggtaacaccggcattgctctggctatgattgcggcgatgaaaggctaccgaatgaagttactcatgccggaaaatatgagccaggagcgtcaggcggcgatgcgagcctacggcgctgaattgattctggtcagccgtgagcagggaatggaaggcgcgagagatctggcgctggagatggagcggcaagggcagggcaaggtattggatcaattcaataatcaggataatcctctggctcattttactggcactgggccagaaatctggcagcaaacggcaggaaaaataacccatttcgtttccagcatgggtaccaccggcaccatcaccggtgtaagtcgctatttgaaaagccagaatccgcaggtggaaattatcggtctgcagccggcggaaggcagcagtattcccggtattcgtcgctggtctccggcttatttaccggggatttttcgtccagaactggtcgatcaggttttggatattgggcagactgacgcggagaaaaccatgcgtcttctggcggagcaggaagggattttctgcggtgtcagttccggcggtgcggtggctggcgctttgcgcgttgcggcagaacgtccgggcgcggtgatcgtggcgattatttgcgatcgtggcgatcgctatctttctaccggcgtttttgattagtgacaccgttaaatatggcatccgaagttagcgctacacttcggatgcgtttcagctactgctggcgtaaccggttgccatcccaagataattgtctaatggacgccactgccgcgccgttatcggtttccccgccaatcagccagatattatctccatcctgaatagaaacgccgtaacccaaaggttgaggtaatttcccgacgattttccattccccgttcaccaatccatagacttcgtcacgccagttttttttcagtccttgatgagcataaagctgaccggcgttaaattgtgctctggcaccggggaagttggctccgcccgctaccaatatggcctgatggctaataccagcaaaagctccggccaacccttcctgttgcattttatcgctggctggaatcagatcgggcaaccgcttccagtgcatctgatcttgttgccatgtcccttctagcgcttcggcggttcgtaatcctggtttgacttctccgttaatcaaaatgactcggttttgccgagtcgcgatagcagagcctgcgcggccaaattgaggcaactggccgccggatcgccattgattattcgtcgggttataaatcatgatttcccgattgaagaaatagctctccggtgcctgattgaaataagtctgagccacggcatctttttgttgcgccgtttgagctgcgcttaaatcctgaaaatagccgtcaaatacctgcttattcaccccacctataacccatgcccgttgaccatcaagggaagcaatagcggtgccaaccaatccctgaggtgcgcgggttggcactttttcccaacgattgtccgatggatcgtagcgataaacttcggttaaagcttgtggattggccgcgttttccgtggctttaccgacgccaccgaaaacataaagcttgccatcaagcataacggaaaccgcctgttctcgcggctgagcggggaattcagctattttttcccagattggtgatgtatgagcaatatctatccgaaaccagttcttacctgcgctacctaaacccacgtaaatgaccgaaccatttatggcgccagtaccgttcttgaatgacaaaggaacatcaggtaaagccgctgcctgactaagggaaacagagcctattgccagcaaagcgtaaagaaaacctcgagttgccttgaacatgatgccattcccttatccagagtttgagtattattagaatgtttaactccattattaaaaataaaacggagttaaactattatcaataacatacccagtccgtcgataaaatcgcaatgggaaagcgcatttttgtgaccgcttaccgaaattactctcgctcaagggcacggatcggatccatttcggcggcacgtttcgccgggaaaaagccaaaaaccacgccaatcaggctggaacagagaaaggcgctaatcatggaggtcgcggagtacaccatagtaaaactggtgctgaactgactgaataacccgccgatcgccagcgacaacaacacgccgaggcaaccgcctaaaagacagaccaataccgcttcaatgagaaattgctgcatgatatcgctggaacgggcgccaacggccatgcgcacgccaatctctttggttcgttcacttacggaaaccagcatgatattcattacgccaatgcctccgacaatgagcgaaattaccgcaatcatagataccaatagcgtcatggttgctgtggttttctcgatggtttgacggatactatcggtattcatcacgaaaaaatcctgattgccgtgacgctgagtaagtagttttatgacgccctgctcagcgttagctaagtcaatatcatcgtttacccgaacggtgatgctctttaagtaggactgaccgagcatacgcttcatcgccgtggtatagggaatccagacgttcagattttcatcactgccaaaaccgctctgttttttagccgccacgccgataatccgacaggggagggaaccgagtaaaatcacctttcccaatggattttctccgtttgggaacagtttgttacgcgtgttctggtcgatgacaacttcttgcaacaggttgtccacgctggtgcgggtgaaggccattccctgatcgatttggtagccgcgcacggtgaagtattgctcgcccacgccgttgacggtaccggataccgattggttgccgtagcggaaaatcacgctggtagacagcgtgggcgtaacgctgtgaacgtaaccttgctgggctaatgcatcagcatcggtggcgcgcagcgtttgaatcgctgccgaacgcctatcgccaaaatccttgccagggaaaatctccagcgtactggtgcccatcgcgctgatattagccagcacttgttgctgagagcctttccccagagcaaccactgaaaccaccgatgcgataccgataataatacccagcatggtgagaaacgtgcgcaatcgttgggcggccatcgacaacagcgccattttaaaggcttcttgcagtcgatcgcgttgcctcagccagcgagagggctgaatcgatgtttcgatcgtggctggcaggtttttctccagattttctagcgtatcaggttccagactactttgtgagtcgcggtcagcgatgatttctccatcacgcagctcaataattcgctgagcatgttcggcgatgcgcatatcgtgggtaacaatgaccaccgtatgtccctgagcatgtaggcctttgagaatactcaaaacctcattaccactgtgggtatccagcgcgccggtgggttcgtctgccagaatgacttcgccgccgttcatcagcgcgcgggcaatgctaactcgttgctgctggccaccggaaagctggctgggatagtaatccaaccgttcgtttaaccccaaacggccaagcaaagccgccgctcgccgacgtcgtatttcccgttgactaccggcatagatagctggaatttcaacgttgccctgggcggttaaatctcccagtaagtgatagcgttggaagataaagccgaagtgttctcgacgtagcttcgccagctcgtcattactcatcagttgcggggcttgtcctgccacccaatattcgccagaactgggtttatccaagcagccaagaatattcatcagcgttgattttcctgagccggaagccccgacaatcgcgaccatttcgccctgatgaattgtcagattgatgtttttcagtacctgaacgtgctgttcgccgttgatgaattgacgacaaacattatccagatgcagcaagatcgtttttgattgggcgctatgcattatcgcatccccatcggtaggcccatgcgctgaaccttactggtcattgcagtgccgctggattggctgataatcaccttctcgccggcctgaagtccggaaatcacctgtgcgtccacattgttattcaatccaatggtgacatcacgcagactaatattccctttttcatcaaccacttgaacctgattcttattgccccgatgttcaatggcggtagaaggaatgacaatggcgttttctgctttgtccaacagaatatatacctgtgcagtcatggaaatccgcagttcgccattgggattggccacgtcaaacaggccattgtaataaatggctgtgttggtggacgatgtactgctggcgctggatgaggtgctggtatcgtcgtcgttgattgagtcgggagccggttctacggcgcgtagcgtggcgctgaaacgttgctgcggctgaccgagaatagtgaaatatactggcataccggttttgactttgatcacgtcggcttcggaaatttgcgcttcaatggtcatggtatccagacgtgcaactttaatgatggtcggtgcgctttgtaccgcgttaacggtttggccttcttccacgggaatagctaccacggtgccttcaattggcgaggtgattttggtgtaacccagattgagctgcgcggtgctcacggcgattttggcttgagcgatttgagcgtccagcgcttcaatttcggattgagtggcagctagagtggctttggcgctgtcataatcggcttgagtgcccacccccattccgaggattttctgttggcgctgataggtttggcggttattttccagcgtagcctgtttggcggcgcgctgcgcctgcacgttttttaaagcggcttccgcgtctttcaaagcgttttgttgagtcagatcgtcaatttcggccaccaactggcctttttgcacttgttgaccaagactgacatgtagggctttgatttgcccagaaacttgcgcacccacgctaacctgttttttcgctttgatggtgccatcagccagaacggtttgctccagattgccgatttgagcggtggcggtgatgtaagcgggcttttctggcgtagagaaaaataaaaaatagagaacgaaacctgccgccagtagtgccacgagcagccatagcgcccgtcgtttggtaccaatgagttgttgcataattgaccaaatttccttgagtcattctaagacaaaatctacagagaaatactgagtcataatttaccgccaagcaccgccgttaggggtaaagcggattttaggaatatgtaaggattcagtaaaactggctgcgctggcgataaattggcaggaaaataggtgaaatcagttaagggagaaatatatgaaaattctattagtcgatgatgatattgagcttggctcaatgctgaaggagtacctgagcggcgagggttttcaggctgatttggccgttaccggtaaatccggtattgatggcgcattatccggcaattataccgcgctgattctcgacattatgctgccggatatgagcggaattgacgttttacgacaggtgcgccagaaaagtcgattgccgatcatcatgctcaccgccaaaggggacaatatcgatcgggtgatcggtttggaaatgggcgcagatgattatatgccgaaaccttgctacccaagggagctggtggcgcggctgcgggcggtattacgtcgcttcgatgagcggccagagcaaagcagcggtgactccctgctgacgctgggagcgctgacgttgaatcccgctacccgcagcagccagtggcagggtaaagcttttgatttaaccgcctctgaattcaatctgctggaattattgctgcgttcgccggatcgggtagtgactaaagacgaactgtcggataaaggtctggggcgaccgagagaagcctatgatcgcagtgtagatgtgcatatcagcaatattcggcaaaaactcagccagttgccgaataataacctcaatattgaaaccgttcgcagcattggctatcgcattaaataacggtttttcaggatatgattatgcgtggacgcctgttttggaaaatcctattgggtttctggtttacctttattttgatgacccaactgctttgggtgattttttctttctatggcaaccgacacgagccgccggaaaacggcatgatgcgacagattgtggcccagcagatgaaatccgccgcctcggtgctgagcagcggcggtttgtccgcgctggaaacgatgatgtccggctggacggaaccggaaaaaaccttgttttcagtgcgacctgaatctgcggttccgccggtttctgctgcaaaaacactcaccgattcaccgtcacacctcgttaagtgggctacaacacctgagggcgataaatatcagctaagttatgattttgacggtatgcgggcggtttatcatccaaaagggaaaagggatcagattctgaacattcctaaacccttattctggatgggcgcattgggcgggctatttttcagcacttttttggcatggaatctaacccgtcccatgcgccagctgcgggatggctttgagcgagtcgcgcagggcgatcttgcggttcgcttattaccgatgatgcgtcgccgccatgatgaattgaccgaagtggcacgtgactttgactcaatggctgagcgtttacaggcgctagtgagcgccagagagcaactgctgcacgatgtttctcacgaattacgctcgcctttggcgcgtttgcaactggcgattggattggctcatcaaaacccaggaaacgtgaatacttcattgcaacgcattgaacatgaagctgaacgtctggataaaatgattggtgagttactggcgctttctcgcgcggagaatcaaacgctaacccatgacgaagaatatttcgatctgtacggattggtagaagcggtggtgaatgacgcacgctatgaggcgcaggtgccgggcgtggagattgtgttacaggcggagcctgaaagggaatatacggtgaaaggcaatgccgagctgatgcggcgcgccgtcgataatatcgtgcgtaatgcgctacgtttttctacccagggccagcaagtaacggtcaggctttcacagatagaaaaacagtatcaaatcgaagtggtcgatcaggggccgggcgtggaggaaagccgcttatccagcatttttgatcccttcgtacgtgtgaaatcggctatgtcaggcaaaggttatggcctgggattagcgataacccgaaaagtgattctggcgcacggtgggcaggtagaggctaaaaatggtgagcagggcggcttggtgattcgtttacgtgtcccgcagtggtctacgcactagcggtaaaatactaagagcgtagcatccgacaataaaaaacggcgcctaagcgccgttttctcatccgcaatattattacttcttgatacggataatcggtgtttcaccgacggtcacgctgccggaaagtttaatcagttctttgatctcgtccatgttagagataacaaccggagtcagggtagacttggctttctcttccagcagggccagatcgaactcgataaccacatcacctttcttcactcgttgaccttcttcagcgatgcgtttgaagccttcgcctttcagttcaacggtatcaataccgaagtggacaaacagctcgatgccgctgtctgattcgatagagaatgcatggttggtttcgaaaattttaccgatggttccgtcaaccggagcaaccattttgctgcctgatggtttaatagcaatgccatcaccaacgattttttcggcaaaaacaacgtctggcacatcttcgatgttgacaatttcgccagacaacggcgcaacgatttcgatagtgccgctgtctttcttatcatctgaaacaaatgatttcagtttatcgaacaaacccatgatcttctcctaagtatttatattggacagcgttccagtctcatggaattagcagagtgttttctcttcgatgaacgtattaaccaagtccatcaattcttgcgccgttggtttagataacgcttcagcagccaacgccttcacatcttcgaaattcgtgttacggataattttcttgatgcgcgggatcgagattgcactcatgctgaattcatccagccccatgcccaataacaacagtgtagcacgttcatcgccagcaagttcaccgcacataccggtccacttaccttcagcgtgagatgcatcaataacctgtttgatcaggcccaataccgcaggcgacattggattatagagatgagaaatcagctcattgccacgatctactgccagagtatactgagttagatcgtttgtcccaatactaaagaagtcaacttcttttgctaaatggtgcgcgatggttgccgccgctggcgtttccaccataacacccacttcgatagattcatcaaaggctttattttcttcacgcagttgagctttcagcatctccagttctgctttcagtgcccgcacttcttcaacagaaatgatcatcgggtacatgatgcgcagcttaccgaaggcagaagcacgcagaatggcacgtaattgcgcatgaaggatttctttacgatccatggcaatacggattgcacgccagcccaagaacgggttttcttcttttggcaggttcatgtacggcaggtctttatcgccgccgatgtccatggtacggacgataactgcctgagagcccatggcttccgcaacggctttataagcctggaactgctcttcttccgtaggaagagagtcgcggtccataaacaggaattcggtacgatacagaccaacgccttcagcgccgttacgttcagcaccggcgatatcgcgaacggtaccgatgttggcaaccacttcaacctgatgaccatctaaagtgatagccggcagatctttcagtttagccagatcgtttttctcggtgatgtactgagtattcaccgctttcaattggtcgatcacatcgctggttgggttaacgtaaatcttgttgttcaccgcatcgaggatcagataatcgtcgttcttcacctgtttggttacgtcgctggtgccaacaattgcaggcaattccagggagcgcgccataatcgaggtgtgggaagtacggccaccgaggtcagtaatgaagcccagaactttatccaggttcaactgcgcggtttcagacggcgtcagatccgttgcaaccagaatcacttcctctgaaattgcccccaaatcgacgatggtcaggccgagaatgtttttcagcaggcgtttaccgatgtcacgtacgtcagctgcacgttctttcaggtactcgtcatccagttcttccagcgctttcgcctggccttcaatgacggtatatgcggcagcgtcggctgaagcatgttcgtctttgattagggctatgatttcctgctcaagctcttcgtcttccaacagcatgatgtggccttcgaagatggcagctttctcttcgcctaggctctcgccagctttggtcttgatcgcttctaactgttcagatgctttcgcccggccagatttgaaacgctcgacttcctgctctacctggtcagcagagatttttttccggttgatgacaatctcatcttctttcagtaaaagtgctttaccaaaagcaatacccggtgaaactaaaatgcctgaaatcataaccctaccttactcttgactggttttaacttaaaagactgggcttcttttactcaagctctgccatcagttttaccaggtgttcaacggctttctgttcgtcatcaccttcagcagagatggttactacagtaccttgggtcagacccagagtttgtagtttgaacaggctcttagcgctggcgcttttgccattggaagtaacggtaatttcagaagcaaaagctttggcttctttaacaaactgtgcagcaggacgggtgtgtaggccattcggtgcggtaatagtaacttcttgctggaacattgtgtttccccaacttattttggatttatgttgtggagctaaagtctagtgtaatttcctaactttagcctgtattggctagcgccagactatggaacaaaaagacaagctctgatgcaacaggaaaccagagtcatcgccaaggaggataaccttctcttcgcgttgtgtctccaatccacattatgtatgtcgcatattactcttttcagcaaaatgattaaatcgattcagctaaagtaacacacgttgtgggattaatttcacgcatcaaaataattgaccggttaaatactaaacccagagggtaaaatcaatcgttatgtagtgaaaaatttgacgtacaccacaaaaaaagcaccgcgagggtgcttttttagcatttagtgcgaccgtaagccttactgttgcagttcttgttccgtgaacaaatctgcgaacaaagcggtgctcaaatagcgttcacccgaggaaggaagaataaccacaatttccttgtcagtaaagccagcttcttcagatagcttcactgcggcagcaacggctgcaccggaagaaataccggccagaatgccttcttcttccatcagcctgcgcgccatggcgatagcttcatcgttggtaatcagtgcaacacggtcgattaaggataaatccaggttgcctggaataaaaccggcgccgatgccttggattttgtgtggcccaggtttgatttcctgaccggccagcgcttgggtaattaccggggaatccgttggttctaccgctaccgtggtgatggctttgcctttggtttttttgatataacggctaacgccggtcaaagtgccgccggtgcccacgccagcaataaatacgtctacgccgccgtcggtatcttcccagatttccgggccggtagttttttcatggatttcagggttagcgggattatcgaactgttgcagaatcagataacgctgcgggtcggtagcctgaatctcttcagccttggcaatcgcacctttcatacctttcgcgccttcggtcagtaccaaattggcacctagcgctttcagcagtttacggcgttcaatactcatggtttcaggcatggttagcgtcagtttgtaaccacgagcggcggcaacgaaagctagcgccacgccggtgttaccgctggttggctcaacgagttcgatacccggcttcagcacgccacgtttttctgcgtcccaaatcatgtttgccccgatgcggcatttgacgctaaaacttgggttacgcgattcgacttttgccagaacacgaccgttgccgatacggttcagtctaactaacggcgtatggccgattgttaaagaattgtcttcatatatcttgctcatagcctgtcctttaactctatgaaaatgtaggaaacgttcaaagcatacgctaacaggtcggctatggaagtaaagaattggtatatctatatgtgattaggaaataagtttttccatcaatgaaaagggcgcgaaaaccgcgccctgacaggctttagcgactaggctgaacaaactggtgacggtaacgatccacccacatcgcggtggctccgcacacggcaacgggcataatcatcagattcagaaacggaatcatggtgaatacgctgaccaatgcgccaaactgcaaattatcgactttattttgccgtagggcgctgcgcatgtgctgaaagctcactttatggttatcaaaaggataatcacagtactggattgacagcatccaggcgctgaacaggaaccatagcaccggcgccgccgtctggcctatgccgggcaccagatacagcaacaacagcactaaggcacggggcaggtaatacatcagcttgcgccactctcgcgacataatgcgcggaatatctttaacgatgccgaggattccagtgtctggcagcggttttccggttagctcgccctctaaatgttcagcgagtaagccgttgaacggtgcagcaataaagttggctaccgtgctgaacaaatagctgaataccaagagcactgaaataaccatcactggccacaatagatagctgagccattgtagccagtccggcacgtagctcattaactgtggcacccaaacgctaattcgattaaacagccaccaaaaagcgccgcccatcagtaaaatgttgaccaatagtggcaaaataacgaagcgtctaatacctgggcgaataattaaccgccaaccttccacaaaatagtgaaagccgctggtggtttttgtgtctttttgcacgagtgacatgccttccatttctctgtaactgaatcgtccagcctatcatattgctatcaattttctctgcctagtgccatattggttaataaacgaacgaaatagctagcataatcatctttcttaacagaaaatcgagcacggacttgcacttgtgaacgttgagaaatagagttaaagggtgaatgtttgccgcggtggcaatgtattggaacaacagagatagtaatgatgcaggatttgcgtctgatattaatcgttgttggcgcgatcgccataatagcgttgttattgcatggtttatggaccagccgtaaagaacgctcttccctatttcgcgatcgcccagttaaacgtccgaaacaagaacgtgatgaaaccccgatcgagaccttcgatgaaggggttggagaagtgcgggtacggacttctcatccacaggataagccttcgttaagtcacgttgatgacaacgatgaggtgcctatcattcaacatactgagcctaaaccggcttcggtaaacgtagcgtctcgtcaagcgccggtagcccccgtgcagccagagtatgacgatccgttgctgggcggattctcgcctgaacaaccaccgcatgccacatcgggtgatccgctgttggggtcggcgactgaatcctattcagccccggaaccagcgccagaaccacagcacgttgagcctaagcaggctgaaccgcagcacgaacctgtagctgcatccgctccggaagtgaagcaagttgcgaaactgaaagaaacggtactggttctgcatgtttctgcccaccacggtggttctatcggcggcgaagtgctattgcaaagcgtattgcaggctggtttccagtttggcgaaatgggcattttccatcgtcatctcagcccggcaggcagtggcccagttctgttcagtttggcgaacatggtcaaaccgggatctttcgatcctgacaccatgtctgatttctcaacgcctggcgtctccatgtttatgatggtgccgtcttatggcgatgcgaatcaaaactttaagttgatgctgcaatcggctcagcgtattgccgatgacgtcggtggtgtggtgctggatgatgagcgtcgcatgatgacgccgcagaagctggagacctataaagcccgtatccgtgaagttctggatgcgactgccgaatagtaagcttagatagcgaaacgaattaacccgaacccccgcatgccgggggttttttatctttgatggtgggccatggaatcgataatccaacaacttaatcaactgcgagcctcactgcgccatcacgaacatcaatatcatgtgctggatgcgccagaaattcccgatgcagaatatgaccgtctgatgggcgaactgcgggagctggaagcgcaacaccccgaattgattaccgcagattctcctacccagcgtgtcggtgctgcacctctggatgcctttgatcaggtacgccacgaagtccctatgctgtctctggataacgtatttgatgaagaaagctatctggctttcaataaacgggttaatgaccggctgaaaatcgcagagccgctgaccttttgctgtgagctaaaattagacggtctggcggtcagtttgctgtatgaggacggcgagttagtccgcgctgctacccgtggtgatggtacgaccggtgagaatattaccgccaacgttcgcactattcgcgcgattcctttgcgtttgcacggtgacaatattccgcgtcgcgtggaagtccgtggcgaagtctttatgccgcaggcgggttttgaacaactgaacgaagaggcgcgacgtaaaggtggcaaaatttttgccaatccgcgtaacgccgccgctggctctttacggcagctcgatccgcgaattacggccaaacggccattaacctttttctgttatggcgtcggtttgatggacggcggcgaactgccccgtagccatttttcacgcttgcagcagtttaaagcctggggtttgccggtcagcgatcgcgtcaaactttgtaccggggctgaacaggttattgatttttatcatcaggttgagcaagatcgtgccactctggggtttgatatcgatggcgtagtgatcaaggttgactcgctggatttacaggaacaactgggctttgttgccagagcgccacgctgggcaaccgcgtttaaattcccggcgcaggaacaagttactcaggtccgcgaagtggagtttcaggttggccgcaccggtgctatcacgccggtagctcgtctggagccggtgcaggtggcgggggtgattgttagcaatgcgaccttgcataatgcagatgaaattgagcgtctgggtctgcgtattggcgataccgttattgtgcgtcgcgccggtgatgttattccgcaggtagtcggcgtggtgctggatgaacggccagccaatgcgcgggaagtgatattccccgatcgttgcccggtatgtggctctgatgtcgaacgcgttgaaggtgaagccgtggcgcgttgcaccggcggtttgttctgcgccgcgcagcgtaaagaagcgctgaagcacttcgtttctcgtcgcgcgttagacgtagacggtatgggcgataaaattatcgaacaattggtggagaaagaatatgtcaccaatccagccgatttgtttacgctgacggccggaaaactgaccggtttggatcgtatggggccaaaatcggcacagaatctggtcgccgccttggaaaaagccaaggaaactacctttgcccgcttcctctatgcattagggattcgtgaggttggtgaagcaactgctgccaatctggccgcgcacttccgcacgttggataatctgcgttcagcggatgttgaagcgctgaaagccgtaccggacgtgggtgaagtggtcgctaaacacgtgctgaatttcctatcggaagaacataaccagcaggttatctttcagcttgaacacgtggtgcgctggccggagccacagcggattattgcggaagagatcgacagtccttttgctggaaaaaccgtggtattgaccggctctctgaatattctttccagagatgaagccaaggatcgccttaccgcgttaggcgcgaaagttagcggcagcgtgtcgaagaaaaccgatttggtgatagccggtgaagccgcgggctcaaagctggcaaaagcgcaggaattgggcattaaggtgatcgatgaagccgagatgatccgtttgctgggcgaatcagaataaacctgaaacccgccgttgccgcggtgggtttggcctgaatggctgagaggtgtggagtagggtgtggaaaaagaaaacctgattgaaatagccaatacccgtatgccttttggcaaataccaagggcgagttttgatcgatttaccggaagaatacctattgtggtttgcccgtaaaggagagtttcctcagggtaaattgggcatgctgatggagctcacgatgacgatcaaaatggaagggctagaaggcctggttaaacctcttaaaaaagactgacataccatgatggcgacactatttttgcttcagtgctcgccatcattaattcatctatcttatccaacccattaagaaataaacgttaatctgactctgctccgtcgggcgattaatatcgtctccagccgttgggctgttgtcggggctgtctgattgctgcgtgttttccgcttctttagcctgaatccgggcgacttcggcctgcaatgtcttaattttatttggaatcagctgttgctgcttttacttttcatcggcgctgagatccgaatctttaatggtactgagcttttccgttaacgtccgaattagctaagttggcgcttttgcctgtgaggtattgcggttatcgctggaactggcgatggcagaggcggctgagatggtattcgacatttctattcttcaaaacagatagggaataaggcttattagggtttctgtctttaacggttgacgcggcttttacacaatcctttcactgactgaacgctggcttatcacacggtattattgggttatatttgataccagagaattgaacgtgcaaaagggcgggtagatgagcgcggggaaaatcccataaagctgcagagtccaaacgcaataaaaccagccataagctggtttacgcgtaaatgggtggaagcgggctaatacggcagccagtcgaattaagccttagacatagatattaatctgattgccagcgcgattttgcccatcgtcagcgccgacgcgggttttgttgacgctatctactgcggtcagggcgggtttgttactctgcgcatgggttgttttgatggcgagcagatcgtccttacccttttctgcctctttggcctgaattctggcaatttctgcatagagggctttgatctggttggaaatcaactgctgttgcttttgtatttcctctttcgataagccggagtcttttagctcggacaatttctccgtcagatcctgtatttgctggtgcagcgctttgatctgagattgggtgtcgctaccggtacctgaggtgctcgccttgttatgttgggctatttgcggtaacggggctgctgtagtaatagtattggacatccttttctcctaataatcatgtggggattaagaggtttatcggcataatcagctgattctttagtcagttgtcggatattcatatagcttgagactggccgctgtagaccaaacgcagtttaggccagaggcttagccaacctttatcggttactcgctgatgaaaggtcgccagatcgccgtttttatcattgaaagtaatcgttgaggtaaacaaagcctgtaaacccagaggcgcaatcaaagtgaggctatcatccgcttccagccgcactccgatagcggtttcgacctcgacccaatagctgattgcgtccgcggtgttcaaataagggggacggttgctgcgcaagtgcatacgcgcctgattttttaccgaccacggcagcggagattgcatcagaagctgcgcttctaactctttatcgcgctgtgggtgaatgttatcgcggtcaaagtagaccagatcgatatcattcagcgcagtgctgtcggcataatcctgcagccggtcccataccagattacgcacaaaaccggcagccaaacaccattggcttaatcctaattgacgggcatgacgtagggcttccatgcgttggctatcggactgtatccactcaataatttgctgttgctgaggcatagaaatccaaactgatttatctgatgaataagcgagaaatagcatgccagcccggaagggcgaataggtagcgaccggatcagttgttttttgaatagcagaaagcaaaagaccggccataggccggtcttttaaatggtggtggagctagacgggatcgaaccgtcgacctcttgcatgccatgcaagcgctctcccagctgagctatagccccacaaatgtggtgtagtactggaatttatactgaaaattatttgtaccgccaatcaaccttaattgcattcaatcaagcgaagtttggtggagctagacgggatcgaaccgtcgacctcttgcatgccatgcaagcgctctcccagctgagctatagccccaatgtacacataataaatcgtgtgaacggggcgcatgatatgaaaccgcagaaacagtgtcaacggctaattccatttctgtgtttaagcgctgaaaaagccgccaaatcagcataaaaagcacagaataatggatgacgtatcacagctttcacttttataaagatgaaaaaaagcggccaattcaggccgctgtgagactcgaaaaaacgaaagtcttactgttgcgcttcgcgttgagcgataaatgccagcgctttatcgatacgagatagcgaacgtgactgaccgatagcataaacggtgacgtccatgcctggggactgacctgcaccagtcacggctacacgcagtggcataccgactttgcccatacctacgccgaggtcgtctgcggtgctctgaatcgcatgatgaacgttttcagctgtccaatcggtaatggcagccagtttagcgcgtaccgcttccaatggctgacgagcaactggacgcaggtgttttttagccgcatctgcgtcaaactcgtcaaactcttcatagaaatagcggcaggattcggccatttctttcagtgtcttgcagcgttcgcccagcaatttaacgatttcaaccaactcagggccgttgcgggtatcaaaaccttgctgttcgatatgccaagccagatggactgccacctgctccggcggcagagtattaatgtaatgatggttcagccactgtagtttttccgtattgaaggcgctggcggacttactgatggcatccagagtgaagagttctttcatttcttcaacggagaaaatttcctgatcgccatgagaccagcccaagcgaaccagatagttcagcaaggcttctggcagatagccatcatcgcggtactgcataacgcccaccgcgccgtggcgtttggacagttttttaccgtcgtcgcccagaatcatggaaacgtgagcataaactggaaccggagcgcccagcgctttcagaatgttgatctggcgtggtgtattgttgatatggtcttcacctcggataacgtgggtgatttccatatcccagtcatcaataacaacgcagaagttataggtcggagaaccatcggtacggcgaatgattagatcatccagttcctggttgctgaattcgattggcccgcggattttgtcatcaaagataacggaaccttcctgcgggttacggaaacgcaccacgcatggctcatcggcgctgtgggtgcaatggctgtcgcggcagtggccgtcgtagcgaggtttttcgccgttagccatttgggtttcacgcagttcgtccagacgctctctggagcagtagcagcggtaggcggtgccgttttccagcatttgatcgattaccgcgttgtagcggtcaaaacgtttagtctggaagtatgggccttcatcccaatccaggttcaaccagttcatcccgtccataatggcgtcaatggcttcctgagtagagcgctccagatcggtgtcttctatacgcaatacaaattcaccacctaaatgacgagtgaataaccaggaatacaaggcggtacgtgcgccacctacgtggaggtagccggtaggactgggtgcaaaacgggttttgattttcattgggatcaagtgccttattacgctacgcctgtcggcagaggccgacgattgctcggaatttgaaaaaagtaggccacattctatcactctgccccaattcctcaacgccgttccggagtagactgatagtattcgtggtgtttatggctaaagaaacgtcaacgttggtgataaatatcgcatcctgtttaaaattgcggcgaacgattgttttcgttctaaaaagcgttgactcacttcgaactatccctataatgcgactccaacaacacggcggggcgattagctcagttggtagagcatctcctttacacggagggggtcatcagttcgaatctggtatcgcccaccaaactcgacgtgttagcagtaagaaatagaatgagatagatgagggcgattagctcagttggtagagcatctcctttacacggagggggtcatcagttcgaatctggtatcgcccaccactcatcactcattgagttgttcagcagtaccgttgtaagtaagaagtgggcgattagctcagttggtagagcatctcctttacacggagggggtcatcagttcgaatctggtatcgcccaccacttcttaagacttcgggtcgttagctcagttggtagagcagttgacttttaatcaattggtcgcaggttcgaatcccgcacgacccaccatctccttctcgcatcagtaaactccccaaaaaaataacatactgcacgattcgtgtgggtgagacctgcgttcaggctcgagccaagcaaagcacgcaccattcctatttccattttatctccgtcaaatttccctaaaaccgcggttttcagccataacgcttttgcctaggttcacttattgcgcttcgtatcctctaaatagcttgctgaaaaaacctcgcttatacgggtaaatagattatttcatgcgtataaagccagcagagaggctgacacagcgtaggttaacgaggagtacggaaataagccgagctttctcataaggcgcagggagcagtaagggcgcttaattcaatttaggggaagtgctgtggcgtaggatgttacggctgctgggcggctgataagatggctgggaaaaacggcgtgacatgttactgatgactgaaagattgaagaaactgtgggcataaaaaaaggcgctgcagcgcctttttcatcaaccgacttagattaaagcaccagaccagcaatagaggcggacagcacgctaaccagcgttgagccgtacagcagtttcaagccgaagcgtgaaaccacgttgccctgatgctcattcagccctttaatcgcaccggcaacaataccgatggatgaaaagttagcgaaagaaaccaggaatacggacaggataccgacgctgcgcggagacagttcggaagccactttttgtaagtccatcatggcaacaaattcgttagaaaccaatttggttgccatgatactaccgacctgcagcgcttcatgagttgggacgcccataacccaggcaaacgggaagaagacgtaacccagaataccctggaagctaataccaaatgcgaaggtgaacagggcgttaactgcagcgatcagcgcgataaaaccaatcagcatagcggcaacgataatcgcaaccttgaaaccggccaggatgtattcacccagcatttcaaagaagctttggccttcatgcagcgtacccagttgtagctcttcttcttcgcccactttgtatgggttaatcagtgacagcacgataaaggtactgaacatgttgagtaccagcgcggcgacaacaaatttagcatccagcatcgacatataagcaccaacgatcgacatggaaaccgtcgacatcgcagtggcagccatggtgtacatgcgtttttcagacatcttgcctaaaatgtctttataggcgataaagttttctgattgaccaaggatcagcgagctgacggcgttgaaagattccagcttacccatgccgttcactttagaaagcagggtaccgatcagacgaataaccacaggcaacactttgatatgttgcaaaataccgatcaacgcggaaatgaagacgatagggcaaagcactctcaggaagaagaaggccagacctttgtcacccatattgccgaaaacaaaatcggtaccggtcgcggcgaatccgagtaatttgtcgaagaaggcggcgaatcctttcacaaaacccaggcccacttccgaatgaaggaagaagtatgccaatagcacttcaataaccaataactgaatgacaaaccgaatgcggatgctcttgcggtctttacaaattagcagagccaaaatggctacgacgaccaaggccaacgcaaactgcagaatatgggacatgtgtgctccaaacttgaggcaggctagatttcggaggtcattttatgtaacgccaacattaaaaacgagacattgattgcaaatataaaaagtcacctgagtatttgcaattaaattaataggtttcgtcacaaaacgacgcatgttaaaaattttctttatttgtagcgtgatggtgctaatttgttgagagttcttgcgcaaaaagccgcagggtttagtgaatacaagcacagatttccagaaagtaaaacccggctattgaaacagcgatcttggcgggtggttattcagaaagattggctatcagagagataagttttaccaatgcaaatgcgcttgataattattatcatttagataatatgagatagacataatatctctaagggcaaaattgatatgatgaatagccgcgctaccgcttcagagggtcgtacatcaaggaaggtgaagctttccttgatggggccagcatttatcgcggctatcggttacatcgatcccggtaattttgctaccaatattcaggccggagcctcattcggttacaccctgctttgggtcgtggtgtgggccaatctgatggcaatgctgatccaactcctctccgcaaaactcggaattgctaccggtaaaaatttggcggaacatattcgagatcgttttccgcgtcctgctgtctgggcttattgggttcaggcagaaattatcgctatggcaacagatttagccgaatttattggggcggctataggatttaaattattgctcggggtgacgttattagaaggcgccatactcaccggtattgccactttcctcattctgatgctacaaaatcgcggacaaaaacccttggagctggtcattggtggcctgctggtgtttgtcgccgctgcttatattgtcgaactgatcttttcccaacctgaagttagcgccttgacgaagggaatgctgattcccaatttaccaaacggcgatgccgtatttttagccgctggagtcctgggggcgacgattatgccacacgttatttatcttcattcctccctgacgcaaaccggtggaaaggaatcaaaagccgatcgttatgcctcgaccaaactagacgtagccaccgccatgacgatcgcaggcttcgtgaatttagccatgatggcaacggcggcagccgcttttcattttaacggttatggcagtatcgccgaaattgaacaggcttatctcacgctgcaacctttattgggtcacggggcggcgacaatcttcggtctgagtctggttgccgccgggttgtcgtctaccgtggtaggcacgttggcgggacaggtagtgatgcaaggcttcgtccgtttctatattccgatttggatacgccgctgtatcactatgttgccatcatttgtggtgattatgatgggaatggatgcaacccgaatattggtgatgagccaggttttgctgagttttggcattgcgttggcgctagtgcctctgctgtcctttactggcaatcgggaattaatgggagaaatggttaattcccgtttggttcagaacattgggaaactgatcgtcgtggttgtggtggggctaaatctatatttactcattagtctggcttaataaaattcggataaccggcggattgttagtgaataccgccggtattgtttttaatcatcgtggtcgtgatgatggtggcgaccatgatgtttattctgttgttttttgtactttttatacgcgtgcttatcgtatttccaataacgcccatcgtggtaatagtagtttttcttccaccagtccttatctcgccagcgatggccgtcccagtaatggccgcgtcgactgcgttcacctacatcctgcccctgatgcccttgccaccattgacgatcgcgccagtcataaccatcccagtagttcccatttctatcctgttcgccgatctgtaaagagacgccaggaaggagattgatactgacggcctgcgcctgctgtgccaaaggtaatgtagccagcacgacaatcagcaataggggttttaacacgataatttccttctttatctgtcggttgtgataaaaactgagccgacagcgagtcacgcaatattaagatattaataaaataaatagaatctagcgttcagataaaactggaaaacaatgctttaggaattatctgcctgttcatcataaagatgaaggagggcggataattcgccctctggtgatgtgtaaagtgggaaagcgattacagcaggatggattctatacgcgctatctcctcaacactaaagtgagtattagtcagggcagttaccgcatcctcaatttgtgccgttttactggcgccaatcagcgcggaggtcactttgccctcacgcagcacccaagccaccgccatttgcgataacttttgcccgcgatccgctgctagatcgttgagttggcgtacttttgccagtttttcctcggtaatttgcgctggattaaggaatttactgccgctggcagcacgggaatcctgaggaatgccgttgagatagcgatctgtcagcagcccgcccgccagcggtgaaaaggcgatggagccgacgccaaattctgtcaggacatcctgcaaaccgtcctcgatccagcgttcgaacatagaatattttggctgatgaatcaggcaaggcgtaccaagggcttgcagaatagtcaaagcctgctgcgcctgttctgcggggtagttggatagcccgatatacagcgccttaccctgtcgtaccagcaaatccagcgctttcattgtctcctctaaaggcgtctgcggatcgggtcgatggtggtagaaaatatccacatagtctaatcccatgcgccgcaagctctgattcaggctggccaccagatacttcttcgaaccccagtcgccataagggccgggccacatggtgtaacccgctttagaggagataatcagctcatcacgataaggctgcagatcttgctgcaagattcggccaaaattctcttcggctgaacctggcggcggcccgtaattattcgccaaatcgaaatgggtaatcccatgatcgaaggcacagtgaatcagatttcggctgttttcaaacagtgttgcatcgccgaagttatgccataagccgagagaaatagccgatagttttaaaccgctgtgaccacagcgccgatactccatgtcttgatagcggatagggttagcttggtaaaccatgacaatccttaagaggaatagggcagataaatgagtgtaagccttttcactcattcggttcgccagcgggatcacaaggcccataaagtcacgaaatatttacagtgcaggattgctattaattctaacgcattagataaatttaattattagctaatactttgcttatgaactttttatatgttggtttttttcctaaggatcacgcgcgctatgaaaagtagtgtttataaagttgccgattatttgctggatcgcttggcgcaaattggaatcaaacacctgtttggcgtgccgggggattacaatctccagtttttggatcatgtcatcgctcacccgcagattgactgggtgggatgtgcgaacgaactcaatgcggcctatgctgcagatggttatgcgcgtactcagcctgctgccgcgttgctcaccaccatgggcgtgggcgaattaagcgctatcaacggcattgcggggagttttgccgaattcttgccggtgatccacatcgtcgggatgccggcacagcactcccagcaaaagaaagagctgatacaccactctctcggtgatggtgattttagccacttttcgactatggctgaaatggttagctgcgctcaggccaatctcacgttgaccaacgctgccagcgaaatagatagagtagtggcagctgcgcttgctcaacgcaaaccggtttatttacaacttccttccgatgtggcagagatgccgatcgacgccaaacccaattcgctggcgtttcaacaagcgccgtactcatctcagtcattgcgggattttatcgacgcggcgagagagtcacttgcttcagctcgccatgtggctgtattggcagattttttagtggatcgctttggcgctacccagcaattaagaaattggctaagccaaactcatttaccctatgcgacattactgatggggaaaggtattgtagatgaatctcgcgcagagtttattggtacttacagcgcagcacccagtgatgagcggattagattaacgattgaaggagcggatgtagttattaccgttggcgtatggtttgtcgacaccataaccgccggatttagtcagcaaatttgtacggaaagacgcattgatatctgccctttcgaagccaaagtgggttcgcgtgtatttagccaaatcccgatgactatagccattgatgcgctggcaaaactgagcctggaattacagcatgaatggatacagcccgatgtttaccattgcccgttgccgccttctttagcacaacatctggatcagcaaacattttggtatcacattcagacgtttttgcggccctttgatattgtgctggccgatcagggtacggcttgctttggtgccgcagctctgagattgcccaaggatgcgatatttattacccaatcgctgtggggctccatcggatttagcttgccggcggcctatggcgtgcaaaccggcaatccgcagcgtcgagtcattttactgattggggacggtgccgctcagttaagcattcaggaactgggatcaatgctgcgggatgggttaaaacccattattctcttgttgaataacaatggctacaccgtagaaagagctattcacggcgaaaatcaaccctataacgatatatctacatggaattggactcagttaccgcaggcgtttggggcgggtagcgaagtcatatccctgaaagtgagtgagccagagcaattacataaagcattgcaattggctgatcaaaactcgcagctagtatttatcgaagttgttctaccgcagatggatatatcaccactgctgaggaaagttacggaatctctgcgaaacagaaacgcctcaacttgatatccgtggtgattggctgcccgtaagctgttctaacagccagaaaccggctggtcccggcgggttttttttcgaccataccgcatccagagaaatcatttttggccaaccaaccgcagagagctcaaccaattgattacggctgaattgtttcaccatccaacgtggcaggattgcccagccaaagccctgctccgccatttctaacagcattaaatagcttggcgctgaccaaaccggcccttgagccgtatttttatctgtttgcgcataggtgttcagacgcagttgccgcacggtggccagttgttcaggttggatttgttggcactgagctagcggatgattctgttggacaaacagcgccatacaggactgttctggcagaaggctgacgccaatatctggcgggtaatctttttggacttcaaccatacccaaatgagcgcgaccatcttgcagtaacccaataacatcatcggcctcagcaatcatgcattcgaattcaatatcaggatagcgctgctcaaaacgttgcattagagcttcgtggtgagtgggttgatatatatctgagagtacaaaactaagacgaggctctactttatccgccaagcgaatagaaagatgatccaaacgctcgctggcagccaaaatttcctgaacctgcgccagaacgcgacgcccgtgagccgtgagcaccggctggcgtgcttgccgatcgaacaagactaaccccaaatctgcttccaaattggcaattgcagtgctgatggtggactgacttttacgcagtttacgagcggcagcagaaaaagatccctgagatgcggcttcgacgaatgcaattaacgcttccggtgaatagtgcattatctatctacttaatcgatggcttctatttttaatctatcccaaaaagcgatgataatcactcggtagtttttaattcatcaaaaaaacaggtcgattttatgcaagctaatcgtaaatcattcgttgaacgtattattcacgccgtggggttcgaagttatcgccgtcggcatttgtgcgccgctgggcgcttggttattaaaccgttcggttctgcaaatcgggacattagcggtaatgctatcgacggtcgccatgctgtggaacatcatctataacagtatctttgaccgaatctggcctgtgagccgcgtagcaaagacgctggcggtgcgtatctggcacgcttttggttttgaggccgggtttgtattgatcggcgtgcctattgcggcctggctgctggggatttcctggggacaggcttttatgctggagatcggcttcttcctgtttttcctaccttacaccatggcatataactggctttacgacacgctgagagcgcgagtgattgcttctcgtcatcaggcaaaagaaaaaacggctgcgtgtcagagtaacggtcaggattaaggggcgtaaaatgcgggaagcaaatgcgaaattatgcggtgtttctccatgctgaaacgtttttttgtgatccgtatcgctaaagacgcggtgtttagcccgtggtgattgttgtttttctgccgtgattttacagtaggtgcagttaactcaattagttaaatatccatttaacggagaagtatttgatgacgacctatgctttggtgggtgatgttggcgggactaatgcccgtttggcgctgtgcgctgtagcaacgggcgaaatatctcaggcgaaaacctattcagggcttgaatttgacagtctcgaagaagttatccgccagtatctggcggagcataatgttgcggtagaagacgcctgtcttgccattgcttgcccgattaccggtgattgggtggccatgacaaatcatacctgggcgttttccattgccgaaatgcaaagaaatcttgatctgagtaagctggaaattatcaatgattttactgcggtatcaatggcgatacctatgctttcaccgcaggatgttatccagttcggtggcaaagataagcagccgggcaaaccggtagcggtatacggcgcgggaacaggcttaggtgtggctcatttggttcatgtcgatcgccgttggttgagcctgccgggagaaggcggccatgtggattttgcgccaaacagcgaagaagaagattgcattttggcggtattgcggaaggaattagggcatgtttccgttgaacgcgtgctttccgggccgggtttggtgaatttatatcgcggaatcgtgatttctgaccatcgtgtgccggaaaatctggctccgaaggatgtcaccgaacgagcgctggcagatagctgtaccgattgtcgccgggcgctgtcgctattttgcgtgattatgggacgttttggcggcaatctggcgctgaatctcagcacctttggcggcgtttatattgccggaggcatagttccacgttttatggagttctttaaagcgtcgggattccgcggagcgtttgaagataaggggcgctttaaagattttctcgtcgatataccggtttatatgatcacccatcaacagccgggcttgctaggcgccggtgcctatttgcgccagacattaggtatggaactgtagttacattaacaaacgcctattatttgaaaggttaataaggcgttttttttaaagttctgtttagccatattttggataatgacggtaactgtaaaattttttgcagctgccggtctagttgctggcattaataacaggaactttatccatgacaataagtaacataaataccagcagcccctcccctctaatgaatctcccgacaaaaaataacttatataaaaggatagaaacgttaggtcaggaagtgaagaaaattaaaaatgagttgtctactattaaagtgcagattaatgaggggaaaagggcgattaggagtaacaatatcctgctaaaaagcctcacgggtatttcaaacaagcatggcgatgatgtgaatgtgcgcttgaaaaacggcagtgtaaagttcggccaaggtagcaattttttgaaaaactttgtttctggtagccgttatcaagctgagcgacaagaagccgctaaatattttggcgcggagggatgcgaagtctctgctgctgatggtatctctaagcttaaccaaaaaattaatattataaaaagtgcgctgcttgggctggaagagaataaaggattacaggaggccaaacttgaaggagtcaatgataagaagcatcgggtagatcaacaattacaacaaattgttgcggctgaggctaaggtaagaaaagccgatgaagctaatcaaaaaatccgtaatgacttttctatggtttatcaaagtaatgcaggctgtaaggctttaaatgttgaggctcgctaccagttcggccaagggcgctcgcccggtagtctaagcggtagtaaagtcattgccgagtatgaaagagtgcatggtgataatatcttcggccgaggcaacaaaaatcttaaaactacactcaaatttaattgttcggatttggctcaattagtcaaaactggagccaaagcgtggtatacgccaactagcaaaaatattattacgcatcgtggacaaggaataaccagcgcagggattaataaattaattagccaattcaatagcgataaaactcaaaatcaaaccactacttattcactagggcagttcttttctacctccggtgataaaaaggtcgcacaagattttgccaaccgtagccaggatagtgaaagagtgatgtttgaagttaagggcaacagtggtaggggcatttttgtatccggtggtttagcattcgagaataacgagcacgaagtattgtattcgccattagcaaatttcaaagtgacgtctattacgcaaaataatatgggtacttatcacgttaaacttagcgaagttgagcaaaataaaaaagcgagattattaccttactaagtttgtcactgatcaacgctctgattctgataaacccaaatgcctaccaactcttaggcttttcgccaagtattggtaggcattgatttggtctcacttaattcttatcaacctatcaacctattaagcatggctgctggcggtaatacccgtcggttcttcttttggctcttccatctgttttgccgaacctttcggtggtttgataatgagagttaacagtagggaaagcactgacatcacggcaatcacgataaaggtggcgtggaatccacccagacgggcggcgataaatgaacccgccagcgcccctaaaccaaagccttggtagataatgccatagtttttactgtggtttttcagtccgaagaagtcaccgacaatggccgggaatacggtgatattgccgccgaaacagaaggcaatggcacctacgcacaggaagaagagggcgtgagtcaaaggaacgaagcttagaacgcaaactgccagcgtagtgactaacaaagtgaaggtaatcactcgcatacgcccgactttatcagacagcgcgcccagaataatgcggccagcggtgttgaaaatagcgatggcagatacggtattagccgcggtggctaaatccattcccgctaattcgacgcccaaatccttcacgataccaatcagatacaatccactcatacatgcggtgaagaagatgatgaacaggaaataagattctttcactgccagcatttcttttacgctgaaatcacggccattctggctggcttgctgcatattggttggttgtggagcgctgactttttctttcagcaacagggagcctacgccgaccagagccatcacgataagaccccagtagaagaaggccagagagacgccctgattggcaatcaggctggcattgacgtatttgaatagcaggctaccggtaccgaatgcgccaacggaaataccggctatcaggcccttacgctcagggaaccatttaattagattagaaagtgttgtgatatatgcggtgccatcggcaaaaccgacgacgacaccagccagaagataaatcatgccaagggaagtggcgaaggagctggctatcagccccaaacccagaatcaggccggatatcaaagtcagattgcgaatgccgaaacgttcctgcaagcgacctgcaaatagcgtggcaatagccaaagagaaactggtgattgaaaaggtggtggcaactgcgccgagtgaccaactgaatttttcacccagcggctggttgaataggctccatgtataaatagtgcccaaacccatttggacaatgatagtacctacaacgattagccaacgatttaccggtttgctgctcatgccggactccttaacatcaatacaacctggcccgaataattcggtctgccataaaattacgagctgatgattgacgaaggatttggatgttaagtcactatcagcccgcccaatgaagccagtatacgggcgggtttaccatgaaagatcaaatgaggaatgagctgcattcagcacggaatgaaatgcatctataggcgcatcaactgcctgaactcttttaccttgctgcggctgacgggcacttcaaaatccaaatcactgagacgcaggatgtaagtattgttaaaccagggcacgatttcgcgaattttggacaggttaacgcagtaagaacggtggcagcggaagaagtactcctctggcagtcggctgaagaattcagtgatattcatcggcatgatgaactcttcccggcgggtgtaaaccagagtcactttttcctgcgctgcggcgtaataaatatcgttgatatccgtcactatgatgcgttcgtctttcatcagattgatggtatgagcgctgcgcggtgccagaccggtgggttgctcgttttcctgacggttacgcttatgcagcgcttccagtttttgcagcatggtgacaattcgggattcgtgatatggcttgagaatataatcaaatgcttctatttcaaaagcttccaccgcgtgctctttataggcagtgataaagataatatgcggtttatgggtaaatttgctgatattttgtgccagcagcacgccatccaacgacggaatgtttatatccagaaaaatagcatcaacctgatgattttggagatattttaatacatctaatccgtcatcaaaggttgcttctatggtgataccactgtgctggcgaatgagatagctcagttcttcctgagcaagaaactcatcttccacaataatggctttcatgaatattgctccgggtagactggcggtgaagttgaattatgcatgaacttttccgccatttttgctgataaagaatgaaatctcggtgcctggctctaaacgtcgaatttgtaagcctgcaccgtataacaattgcacacggtgatgcacattcagtaggcctattttgttacctggcatttcattattggccaccctgtctatggtctcctgattaatgccattaccggtgtctttaactgaaattttaatttgatctccatgatctttcactgcaataacgaccacgcctttgcctttgcaaggctgaattccatgcacaatggcgttttccaccagaggttgaattaacaggctgggaattcgcagtgaaatatcatcgtcgatatcataaataaccgtcagtttgctgccgaaacgagcctgttcaatagcaatataatcctgtatctgatgtagctctttgcgaatatctatctgttcgtcattcagttcgaggttataacgcaaataacgagacagattgatgatcaactgtcgagcggtatctggattgatccgaatcgaggaggagatagcattcagcgcattaaacaggaagtgaggattgattttactttgcaatgcgcgcatttctgctttatttgccatttccttcagctgttcaatacgtgagacttccatttgcgtagagataatttgcgataggccgaccgccatcactttcagtgaataggtaattttatgagcatggcagtaataaatttttagcgatccggttacttcacctttttcccacagagggatgataatcagcgaatgaatttgcggcgtacggtgaacctcatcgttattacgaatagtaattttgccacgctgaatgctctccttagtgatatcgctaataatttcgtgtccaatatcataggtctcggcaccgacgccaacgtaggccagaatattgtgagtattggtaatggctaccgcatctgcttttatatcggtgcggataatttcacacacggtgctcagtgattccccgttgatatttcggaagtagggcagcgttttattggcgatatccaaagccagtttcgcctgccgagcggcaatcacctctttttcatcctcaacgctttgtaccagcaacacaatcaggccgatacacactgcgcctaaaatcatcggaatcgcgattttcgatacaatatcgatacccagcgccgtcggtttggcccatgccacaaccaaaagcatagtgagcgattcgcagatcatgccgccgagaataccaatgctccattggcgttcttttttcaccttcaaattgatataaccagacatcaacccggcaataatgctggtgataagacagggaacagaagtaatgccatcgatatcaattaaatagcgatggctaccggcaataataccggtgatgatgccgacccaggggccaaatagaataccgccagacattacggcaataacccgaacgttaactagcgatccttcgacgttaatacctgagtaggtaccaaagatggcgaacagagagaaaatagcggttaccgcgagcagttccagcggcgtgtgtttctctttttgtagtagctgacggaacaggcgggtgcgggtcaggaaaaacaggcagatcaacattagcgcggcgcgatcaaaaaccgccagcaacatttcaaatatttggtgcacaacaggctcgtttgcgggtgaatatcggctcactataaggaaaaacggcttttatcgctactttaaccgtgttttttaccgcagcagaactgaagcaattcagtcggaaaaacgagtcttccgactgatcattatctggcgggaggattactgttcgaagcagagctgttgttttcctaatggcgtcaaatcttcaaccgtggctctgccgatgaaatcgacttcaaaatcatcagcggcgaaatccggtggcgatttaccgtcgataaagctggccagttgacgcggtaaataagtggcatttttctcacaccagggagccgcagcgatatacatcacattactgtcaaattcaccgttgtgttcattttccactgagtgaataacgtcgcaatgccagaacaccgtatcaccagcctctagatcgggaataggggaaatggcttcgagtaaaagaggatgccattgttccgatgctgaaagcgctcgacccggcattgcaccgcataagtcatcttctgcgacatcatcttgtaacgcgcgcagcagaatgtaggccatggcgttggcaatcgggatgacattcagcgtgcctgcatgggttcgctgcggggttaacgccgtccacccctgaaaggttcggaacatagagcacactgccggcgatggaagctcacgtacttccggtctgccttctgcggcgaaaggatcatatttttgccattcgccggaaaatacgtggcggtaaacgtggcggaaattttcatccagccagcgctcaatggagccgccgtcaacgtgaggcgataagcccagtgaagatgaatgcggcggccggcggcgggtgcggtcggcgtaagtgactacgcggtcaggatcaaagtgatgtttgccgttactttcgctgtgccataggttattgagaaacacctgaaccgcctgcatccgatgatcctgtcgggcttccacctgaggtttggaccaatagatcccataaatctgcggcttattggccgctaaagtgccgaaataattgtcttcggcggcgtttttcaaacgctcaacaaagttgtttcgctctaaatactggccgatttcccgattccaattctcggctttttctcgtgggaatacgccgtgaatggcgcaggttccccgctgttttatcagttttttttgttgctcggtcacgcggttatggatgatatcgtcagcgtgtaagcgcggcaccgggttttcgcccgcagctaaactttgacgaatagtgtttacctgttgacgaatgttttcctcaacggcgagaaaaacttgctgataatcaggtaaatcctggcgtagctgacgtttgactagcttgattgccgctggaatatcatctatttgtaatgaagacatattttatctctccgacgtactgagacaggggaaacggggcaataggtaaatctgggaaaaataaagccaccgagatgttctacatttgttaaattcatgtggctattatttcggcaaaatagagaagaataaagggatgatgttaggaaaaaatctcccctttattttgtgatttatcccgaccaaacagttgagaaaataatgattcatatcgctaccgaacgattaacgttgagcacgatgacagaacaggattggccacttttttcacggctatatcaggacccggaggtgattcgctatatttccgatccgcaggatctcgtcaccattcagacgcgttttgctgttcgcgtgcagccttgggacaggacttcagaccattggctgtgtttggttattcgcgaaaaagcatcggggcaacctgttggtatcacgggatttttaccggaatggcagccttttcagcaagcggaggtcggctatggcttattacctgaatttaccggcaaaggttatggtcaggaatcgctggtggcggtgctggaatttgcttttcagcaatgtcagtttcataaagtgaaagcgacggtaacggtaggtaatcagccttcccgcgccttgctggagcgctgtggttttcaactggaaggaaccttaagagacaatttcagcctcagtgggaaatggtgcgatgactgggtactgggattgctggccgatgagtttgctgcgagaaaaaatgcgttgttactttgaggtaaaataatttcgttagcctctcgacagtatttcagcgctgcgatatgttcttaaaagacccgtgatggtctgcgtcgctcggacggtccgggcgctaacgtatcctcgaggaaattatggctgaattaccatccaaacgtcgttttacccgcattgatcgcctcccaccctatgtttttaatattacttctgagctaaagatggctgcgcgccgccgtggcgaagacattattgatttcagtatgggtaatccggatgggccaacgccgccgcatattgtagaaaaatgtgtagcgttgctcaacgtgaagatactcacggctattccacttcgcgcggtattccgcgtttgcgtcgcgccatttctcgttggtacgccgatcgttatcaggttgatatcgatccggaaagtgaagctatcgtgaccattggttctaaagaagggttggcgcatttgatgctggcaacgttggatcacggtgataccgttttggtaccgaatccaagctatcccattcatatttatggcgcagtgattgcgggcgcgcaggtgcgctcagttccactgacagagggtattgatttcttcggtgaattagaaagggcgattcgtgaaaccattcctaagcctaaaatgatgattttaggcttcccatcaaatcccacggcacagtgcgtcgaactggacttttttgagcgagtggttgggttagccaaacagtatgatgtgctggtggtgcatgacttagcctatgcagatattgtttatgacggctggaaggccccttcgatcatgcaagtaccgggtgcaaaagacattgcggtagaatttttcaccctatcgaaaagctataacatggccggttggcgtattggctttatggtcggaaatcccgaattggtcagtgcgctggcgcgaatcaaaagttaccacgattacggtacttttactccgttgcaggtagctgccattgctgccctggaaggggatcagcagtgtgtgaaggacattgccgaacagtaccgtcagcgccgtaatgcattggtaaaaggcctgcatgaagctggctggatggtagaaaatccgaaagcgtcaatgtacgtttgggcgaaaattcctgagccttatgcgcatctaggttcgcttgagtttgccaagcgcttgttgtcggaagcgaaagtctgcgtttctccgggaattggctttggtgattatggcgatacccacgtgcgtttcgcgctaatcgagaatcaggatcgcatccggcaggcggtacgcgggattaaaagtatgtttcgcgttgatggcttaattaaaccgactaaactggccaacggcgaataagattagccactcactagccgggctgattttattacccggttagtgtttcttgctgcaaatatagctttttcaataagctgaatgagcctcttaaggttagcttcatcaaaattgcgccatactcttagctaaatagtttttgacgtaagacttttgtggagcatcacaatgaagaatcgctattctctgtctcaaattactctgcactggctaacgctattaatggtgattttgacctattcagcgatattgctcagcgacgtcgttcctgatgaagatcggacgctagtaaagaatctgcactttaattttggccttagtgtctgggtattgatgttattgcggctttggctacgccaacgtaactcttctccggttgttactccgtcattaccaaagtggcaggctgttagcgcccatgcattacattggctgatatacctgatgtttttgtcgttaccgatattaggcgtgctggctcaggcctacggcggcaaaacctggtatttactgggctggcaagtgccacagtgggttatgcctaattctcaggccagatcgttaattaaacaggcccatgagcttattgctactctgggatattttgttatcggactgcatacgctggcggcgctatatcatcactatattcggcgtgatgacacgctacgtagaatgatgccgggaaaataaaatgacaaagggcgcggatgcgcccttatatgccgcaaaaggcggcggggttactctaccattaacatgaaggtgccaatccaaaccaccaacatgaaagagatacccataaagaaatatttcactgaacaactccccttggagctacctcgccagcaatgatccaacttgttgtgcagagtctgaaaagtagataagtatcgccccagcctagttgaagccgtatggttaccaagacagctcactcgctcggatctatctaaaatgccggtctgtcactttgactacggcaggatcgcgctaatgtaatcccataactagggagatatcaatactgtatttttatgcacccgatcacagttataggatttttacacaatttattaaggttatttatctgaaacgtgatggaaataacgattttttaaattttagataaataacaaattgttaccttctttcttttcaatcactctatagattcaatttttctgactaccacatgggcttcgtagcccagcaaatacaaagcctgctccagtgcctcgactttagatgcgtagtccacgtctaacaaacgctccatctgagcagcattcaggccaagtttccgcgctagatcggctttgcgagtgccgctggcgatcattccgttatgtaactcggcttttaatgtgaccaatatcggtaaatgtaccgaaaattcattgtcttctggcattgatggcgcgggaatagagcgtctttcttccatttccaccgcaatcgcggttttaagactatcttgagcttctagctctacatcctcaatagaataggtaacggactgtacttcaggaaaatcgcgaaaatgaatttgatattcgccgctggtttcatcaaaaaggtaactggctggataactgaacacggcgcgtactcctgtagagagaagtctatctaacatagagtagaaagacttctttcttacggtaatgggaaaaatgctatttagaattatatcttacaatcatcaaatatctcacataatgagatgagttcagatgtttttttgttaataaaaaagtctaatcgctcaccgggtttggctatcacagtatttgctttaccattatgcataaccccgccaaattgttgcctaaatcctacgttctctatatcgcgattattcgttatgtcagatattttacttaacgggatacggctattgcaaaatgcagagtcatttgacgaataaataatagtatcgtacttttcttgcaataaatttattctttgatcatcaagtgattcgttctcacatgtatcataatttatattttctactattttttttgaatttttgtcgtaagcaaagaatgtaacaccacgaagtataggtgtaggtaatttttcatattttataccggtttctcccgatgagctgaccgaaacaccaatgaattcgttattaaatataatggacttttgcggtttttcttctaacttaatggagccatcatagctaatgattttcttcttaatatttttatctgataggatatacagacatactttatttttaatgttattgactgcctcacattgagtcacatacataagtttactattttcttttaccgcatcgattacatcgagagcaaatgtattaaaataaacacttttaatgttatttttattatccagactagccaacattggcagtttgaatgagctgtttgatatattaatcacatttccatcagaggaaatactactatctatattaggataggcccacatatttgctgaatatgcaagaaatggatttatattattgttctcatcatgatattgattaatctcacttcgttctttttttaataggttccgaccaaaacctacatcagtgtttttttcaccagacacggcaaggatagttggccatacatctagcaatgtgccctggttagtgatttttcttccagagatatcttttttaattataataaaattatttcttctatcgctatcatgtctgttcaatatatggctaatatcattagccatcatgtaatgatctgaaaccaaaacaataatagttttgtcggcatactgggatgacataactctttttataaattggcttagtaaataatcagagcaagatactgcttttaacatgggttcagttatattttcagagattttcccatcacatacaggcaaaaattgccctgacggagcatgggtatttactgttaagaatgacaacatgaaattctgtttttcggctgagagcctttcaaactcattgtaagcatgttcaataagtatatcgtcatgaactccccagccattcatgagtgtttcgtctgcaagcccgttctctacgaaatattctttatcaaatatgttgttccaaccatgctgactcaggaatttatcgccacctgcgaattccttatcactcccgcgaataaactcattagtatatcctttgctttgaagatattcacctatgcagcttgctgagctaagaaactttgacattgatgaagcagaattaccttgaggcagtgtgaatgggatgccacattgagtatttactaaacccgccattgtccagccgctaccttcatgttgccggatatcggtgaaatctagcgattcattggctatttttgtaatctcaggtagataattaataccatcaaggtttctaaatgtatgttctaagctttcagcgtaaataaatacaaagttgtatttatttcttaattctgcattgggctttttataatatgatgtagcgaattcactatccccataattaaggttttttaatgaggatattacatttttcgcagatgtagagtttgtgataaagagtaatgttccaaaagcaaacgcgacatcaaataatttacgtcttgttatttttcttttctttgaaattattgcaaatgtaattatggctataggagtaaaagaaaataaaatagcaaaggcaatgtttgactttatatcatttaaagatgttccttttacaccgctaagcaaatggtaataaacggagtcagttacaccgttgccagtaaatcggtcacaaacaaaccagaatccgaatattattacacataacgaaagtgctatagctttcgttacgatgaaattctgagatttgaacattaaaattagtaatgtagataataagatataatccatgttgcccactaatatattaaaaagtcatatagtaatatttttatataattttttattttaattaattaataataattaggcaacaattaagttgtcattgttgaagttattctgatcacgacaattagaatcttgaaattaatgcctttaaaaagttatatttatcaatgtgataagcaggatttgtttgtggtgggcagcttgagatgagattttatggctgatgctgaatgaatgaaataaagaaatggtggcccgattttacaggttgttctctatccgaaaaattgctgctctctaagatacggggatatattgcaattgcatgattattatggtttttttgttttttaaggcaggttgttttcccccttcggtcaggttggttttctgtatcggtaactcaatttctatatttatttttaagcctaccggggggaatataactcagagcacggctttggagcgttcgcgcccttgggtacaggatagcgtggtgatatcgctatgtttaccagcatgatagatatttcctgctggaaaaatggctgctacaaatatgatttttaatccctttccccatagcactagagcaattgcgtagaatctgtatgcattcttcaccgttccaatcgtgcagaatatatttcagcaaatagaagccatggcctgatggaatagactcaaagaaatttccagcgccaatcgtgcattgggaagccatatttttgtgtctgatgattttcgcgattttctcagctacagaaggactataaaaaataaccccgacgggattcatgttagttgccaggatggttaacattaatgctccattgccgtctccgctatctataattctattgtaatcgttaaaattatagactggagttactttctgaacgaaatgttgggtcaggtcagccatatcattattaaatttatctgcctgctcgggatacaggtcgtagtgttaccatatatctaattgataatgtggttccaggttacttttctctcggttataccttattgaaacgaagagaaaacaaaggataattctcccatcattgccagcagaaaaggtttaatgttgccaatagtatttttatctaaatccgccgctgggataaattaaaaaattttctcgctcatcatattcccgttaacttcccagaaaatgcctccggcagccagcagccttaatcatcgatatgaatattctgatttcactccggttattttgccggttcgacaacgcttttaggatattaaaagagtcattctgcaacatttagtttggccgtaacctgagcacgtgggctaattgataaccatatacgatttcccaaacctgtttggatgactcgggagaaaatcttggtttcagcataatattttggtcgcagcaagagataacacaagtatagttaatgaatagagagcgcttctgtgggcgctgctcagaatttagttctttcaacggaatattttgatcttcacgttagcccgcatcttggcagttatgttcatattttgtggcttagtcaggtttatctgaagctgataacataatttcattcatgattggctgatacccatatgattcctgtttgttcgcggcgaacaatgtcttaccatagcgatcactttttcttatatgactgtgtggataaccgatgcgttattgggctgctattttacctatgcttactttgctgaccgcctgtagcaatcaaccgacacctttagccacggcatctcagaagggaggttttcttctggaaccagcgcatacaggtcatatgctaagtggtgatttcgcgactaacccggcggcaaaccgttttgtcgataaaatggtgcgagaacatgattttgaccgtcagcaattacatgatgtattagctcaagctcaacaattggattgggttattcgtttgatggataaacaggcacccaccagccggccaccgtctggccctaatggtgcttggaatcgctatcgcaaccagtttattacaccggataacctacaaaatggcatagctttctggaatcaatatcaagatgcgttgcagcgagcttatgaagtttacggcgttcctccagagatcattgttggcattatcggggtggaaacccgctggggtcgcgtaatgggtaaaacccgcattattgatgctttggctacgttgtcattcagttatccgcgccgcgcagaattctttagcggcgagctggaaaccttcctgctaatggcgcgtaaagagggtaacgatccgctttccctgaaagggtcttacgccggagccatgggttacggtcagtttatgccgtcatctttcaagagctatgcggttgattttgatgaaaatggccataccaatctttgggatcccgttgacgccatcggtagcgtggccaactattttaaagcccacggctggcagaaaggtggcaaagttgccgttcaggctatcgggcaggctcctgggctagataatggatttaaaacccgatattccgttgctactttagccgcagcggggctacagccaagggattctctcgatggctatcaggaggccagcctgctgcgccttgatgttggcaccggctatcaatactggtatggattacccaatttctacaccattactcgttataaccatagcactcattatgcgatggccgtttggcagttaggcgaggcggttggccgcgcgcgccaaggctattaagcttattgctatcggttaacacgttgaatattgggctattcattacgtattgacgaaggttttattgactatttgtgggtcgcttcggcgacccatttttatctatttagctccaaggtaatatgtatatccgtactcttattcatgtttattcgtgagtttgctggtctccgataggataaaaagtgtaaaatacaggcttacaaaggtcatagcctttaatttaacgtattttaaaatttattctatttagtattaaggggttatcgtgacagcattacctaattgtccaaagtgtagttccgaatttacctggcagaacggtgagcagcttaactgccctgagtgcggccatgaatggtctgaaaatggcaatgtggctgaggatgaagaaggcctggttgtgcgcgatgccaacggtaatttgttggcagatggcgatgcggtaaccgtcattaaagatttgaaagtgaaaggcagctcttcaactctgaaaatcggtaccaaagtaaaaagcatccgtttagttgaaggcgatcataatattgattgtaaaatcgatggctttggtccgatgaagttgaaatcagagttcgtaaaaaaagctgattaacagagatttagagtaatacggctgataacgggcagtttttatgatttatcggccattttctttaaccattggataaaaacgttaatttttggccactggcgttctgataacgtcgaaatgtaatagcgctgttcgcataccacttccatccctgggaagggcataatcaactcctgatttgccagacgacgcgctaccagtttttttctccccatggcgatacccacgtggttgattgctgcgagaatggctaaatcagaacgatcaaatcccatactgcgctgtgtggtatccagcgtaactccggttcgtcggctccaatcctgccattcactgatatccgagtcccggctccatgcctgtcgatcgtgtagaagcgtacattggcgtagattgatcaaatttccataaagctgatgtttttccgcatattctgggctacacactggcaccattgactcatccatcaggtgttcatacgacaacttttccggcgttttatcatcgtagtaaatggccagatctatgccaccgccgagaaaattgacgttgtcatttccggtcataatattcaggttgatggccggataatgatgagcaaaatcagcgagtttaggcaccagccagcattgggcaatcgacgggcgagaatagactgtaagagtgccggataactcctgatttttaatttctagaacttcctgattaaggtaatcaagggaggatttcagcgcccaaaatacccgttcgccttcactggttaactcaattctccggtgaaaccgctggaataatttaaaccccaattcatcttcgaggccatttatacgatggcttacggcgctgggactaattgataactcattggccgctaaggcaaaagatttatgccgagccgcaacttcaaacgtatagagttttgatagctgatagccattaagaagttgattgcggtggatataggcgttttccgggtacataggggatctgctcactttattttgtctaaatattataccgatttacattttcactacatgataagggttagttaatgtgattcaaatcgtacttatatcgtaaaatatgacctatttggcatatttgatccaatatggctcatctgaaagcgtttttttatcgtttgtcagcccctatcaactcttattcaataaagccacaagaaaactattggttgaggttggatatggactcacaaatatgggtagtggggacgttattaacaagtatcatcattattatattcgccatagtaaaactaaagattcacccttttctggcgctattgttagccagtttttatgtcggcctgttaatgggtatgaacccactggaaatggttaactccattgaaagcggaatcggcggcacactaggatttttagcagctgttattggtttaggcaccatcttaggcaagatgatggaggtctccggtgcggctgaacgtattggcataactctgcaacgatgccgttggttatcaccagacgtcactatggttctggtcgggttggtgtgcggtattaccctgtttgttgaagttggggtggtattactgattccgctggcattctctattgccagaaaaaccaatacctcattgtttaaattagctattcctttgtgtacggcattaatggccgttcactgtgtggttccaccacatccagcagctctttatgtgaccaatgcattgggcgcagacgtaggaacggtcattgtttacggattatttgtaggattggtagcttcattaattggtgggccattattcctgaagttcgtgggtaatcggttaccgtttaaacaagtacccgctgagttctctgaatttcaggtacgtagagaagaagatctgccttcgctaagcgccacattatttaccgtattactgcctattattctgatgttgatgaaaactgcggcagaactgaatatggaaaaaggttcttcgttatattcatttttagagtttattggtaacccaataacggcgatgtttattgcagcttttgtggcctactacactctaggtatcagacaaaatatgggtatgactaccctgctgaaaaaaaccgaagacagtttttcatctatcgcgaatattttattaattatcggtgccggtggggcatttaatggaatattaaaagccagtggcttggcggatactctggccgtgatcttatctaatatggatatgcatccaattttactggcctggctggtagcgattatattgcacgcggcggtaggttctgccaccgtggcgatgatgggcgcgacggcgattgtttcgccaatattgccgatgtatcccaatgtcagccctgaaatcattacgttggcgattggttccggagcgataggctgcactatcgtgaccgactcattattctggctggtaaaacaatattgtggtgcaacgttgagtgaaacctttaaatattataccacggcaacgtttatcgcttcgttaattgccttggcggcgacttttttactttcttaccttatttgatcaacaaagagatattccatgaaaaagacagaaattgataaattaattaccgactaccctttagtcaaaaatcttatcaatctggaagaggttacttggtttaatcctttgtccaccacgttggaacagggcttgccctatgtagggttgacgcaagaagatgtggctgaggcggaagcccgtttacagcgctttgcgccttatttttgccaggcgtttcctgaaacgcaaaagactcagggtattattgagtcggagatcgttgcgattccagaaatgcagaaaactctgcaacagcgctataactgtgaaattacgggccgtttattgctaaagaaagatagccatttgcctatttccggttcgattaaggcgcgcggcggtatttatgaagtattaacacatgcggaaaaattagctaaccaggctggtttactatctgaaactgatgattatgccaaactgttttccgagcctttccgcgagttttttggccgctatcggattgcggtcggctcaaccggtaatttgggaatgtctattggcattatgagtgccaagctcggatttagtgtcagtgtgcatatgtccgccgatgctcgggaatggaagaaaaagaaactacgagaacatggtgttaacgtagtggaatatgagcaagactatggcgttgccgtagagcaggggcgtaaacaggcagaatccgatcccgattgtttctttatcgatgatgagaattcgcaaactttattcctcggatattcagtggctggaaatcgtctgaagcagcaatttgccgagcaaaatatcctggttgatgaggatcacccgctgtttgtttacctgccatgcggtgttggcggtggccccggcggcgtagctttcggattgaaattagctttcggcgataatgtacactgtatttttgccgaaccaacgcattctccatgtatgttactgggcgtgtatacccagctacatgacaatatttcagtgcaggatctcggcattgataatataactgctgcagatggtctggccgtgggtcgcgcctcaggtttcgttggaagagcgatggagcatctattagatggcttctataccctgagcgatagcgaaatgtatgacctgctcggattgctagctcttgatgagggaatccagctagagccttctgctctcgcaggtatgccaggagcggctcgggtaacaagttctccagattatcttagcaagcatggttttagcccagagaaaatgaaaaatgcaatccatttggtctgggcgaccggtgggggtatggtgccagcagcggaaatgagtaaatatctcgctaccgcgaaaatttaggttagctgcatttaatctcagttgacgtgaataaatgatattcaagggccaccttattttaggtggcccctgttgttaatggtgttagccaattcatcggcatcttcattgaccgatatattttcacacagagttatcaggcttctggatgtccgtctatagctgcggctaaatctcgatattcttcacattcagtaccgcataggtctttaattgtcgccaattcggctttagccagatcggggcgacctttaatcatataagcctcaccgagatattcgcgaactttaggataatgaggatcaagggcaattgagcgttgataataactaattccttcgtctgtacgacctaattttcgggtggcataaccacgataattccatgcttcacgggtatttggttgttttaacgtatccaatagatccaaagcttcctgatagcggcccgtttttgccaaatgatatgcatactgtgttttatcactgtcgctgaccatgctggttttttccaccacacaactattggttttggtgtcataaacctggccctttgggcaatccggcgttttattcgaatcatctcccattgcatgagttagtgtagggaccagtaataaactggcgagcaaacatatcgacggtaattttttcatagtattagaagccggatggcttttcatcatgatgtcctgttttgaggcaacatcgagtgtcgctgttttcacggagagagtagcaactgatgaccgcagtgaggataaaaactggctcaataactagccatacccgcaggggccactctctaagtaaatactgaatcgcaggataatcaaggtgggtatgtttataagaataggggggatattcgtattcttagggcttagtggttaacgggtgctttaactaactattcaataagattttttggttggttgctatgatattggttctcgatcagattattatcagatacgaatttgatgacgaaaattagcgatgcagtcaactcaaaattggttaggttaataagaagataaatatatctgtaattatagagtacgtagccagatactgccgcgtactccattctggggaaaaaactttgcaatcatctatcataggcatgataggtttttgattagcggtttggcgtaatatccgatgccaaacggtctattagctctacgacttcattacttgccgtctccatatgttcaagagccgacgtcattgcatctatatcgctgtcaaaaaaagcactaagcgctaaacggccagaatgatgaactgccgcatgaggtttttctaacagttgataagcagagtaatgggcaagattacggccatcacctgctgcataccatttgcctaaacggcattccgtgtgcgaattcacctgaacactatcgttattatctagcaatagtttatatatttgtaatttccatatgacatgatcaattttaacaatgttaagaaactgtaggttggtaatgaatgcaataattgattgcatatgagaagaacgggtaataacgatattgattgaatctacgatattagaaatatctttcttaatatgctcaattaatggtttttgttctgatactatgctacaaactttgactgtattatcttcaatagattttgttaactgaaatatatcatcggtactttctttgacttcgccagacaatgattttatttcctttgctatcacgctaaatccgcgacctttgttccctacatgagcagcttcaattgctgagtttattgcgataagattagtctggtttgatagtttgtttatttcggatacgcaacctttaatttggtcgattgattttctaaactcagttaatgaatcggtactatggttagcattcgtctcaatatgaacaataaagttgaccagtttttccagcgcttgctttgcctcgtcgtttctttgattgagttcgtctattgcattttgttcgcgtttgaggtcgttgctggaattgagcagcgagtcacgaaccatctctagagttgaaaccccggttaaaagttgctggcaaataatcctttcgtagggcgtgcgttgagagatactctccgtgttcgactccgttgaatttaagggggtaatatcatgctgtaaatttgacttagtagagaataacatctgatttattttttttagcatagtgaacattcatattgttatattgacggaatattttatactttaggtgttcttaaaatggtgatccaagtcatatcagttaatatttaatttttattataaaaatatgagcgattttataaagaaaatgaaggtttattattgatgttgattctcggatacatatatggagaaaggtagggggctgacggcgattaactgtgttgttgaaaggcttaatgagggtgaccaacaaaagctatttaaatttattattgaagttatctatacggaacgttaattttaaactttacatgtaaaaacgatgttcaccgatttttttatcagtaaaattttccgtttgttacacggaaaagagcaacggtggacatgaatagattattatgagcgctattgatagtagcggattataatttctaagaatacagcagaagttaattcataatatgttcggtatataatcaatttaaactgcggttatactctttttgcctacttctttatacacactttttggaataaacggcagccagtcaggttgggagtcgaagccgccgatcagttgccattgggtgtttacggaagcagagatttcaattaagcgcatgactatatgcttaccgcaacggataaagcagggaactccgccacagctcagggttcagtcacgattgatgcaatcggtccacacttgacgttgcagatttattcgtccaacgacatttttgtaggaaatattatcggtaacgttcggccgactttctctggtcagatggatccgggtattcgtattaccgtttctattgcggggggaacatatgatgtcatagcggatgaaggaggcgactggagccgcacagtacctgtttcgccaaggatgactcttgggattacgagaatatcgccgcggatgttgccggtattacccgtctgaaccgccaatatttagagccgctggaatgaaccaagaggtatggactttgtgcgtcgctaagtttgtagggtttgtcttttgatttagcgcctcggatagccgtattggttaacggcatgagtgttccttacaataaaggggtacattattgttcgaaccgattataccctgtttagtaccccgataacgttaggctgtagcgggtttgaaaggtctgttatgggatgtggttttaatttaacttgttgttttaaattgaataaattttttttgggatgtattgggaaggtgtcgtggtgtccccgactggaatcgaacttttatcttaattacatgtttttaatgcttatttttaattttaagttaattgtttatacatatcgctatacgtttattttcgggcttatagcgatatgactgataatcagttttcacatgactaattctaatcgatagaaacttcacgaatttcttgatttttacttactgtccttccctgtcctttattagtgttcattgcccttcaaaatcagtcccaaaaaatcagtcacacaagataaactcattgcctgctttttatactaaaatcacttgttttattcccgcaaaaaactagtaatctaagggcgtccgatagactcttaagcaaaccaatggagtattcagtaaatagttgttaattttacaaagtgttacatttattttttttcaataaatttcagcttaattaactgaaatttatattaactcatattaactcgatacgaataaatactaactgatactaagtaataccaactcaatgatgaaaaacattggatatttttattaaaaggtaaaaacacaagaaatagttttgttgggagtgccaagtcatgaactttacagaaagcatattgcgtgtaagtctataggcatccgaggggatttagttgtattgctctcagattatagttatttacgtttctttacgaatgaggctgcttatccatatttatctatatttatcaatattcactcttggcagtacaaaaaataactacaaaccagagtgtgatttggcatagttctctaaccctatatttacatcggctaggggaaatgtaagtctaatagtgtcttcacacatttatacaagtctattaaaggataactttatggagcgggattctattgccataaataatatggcaaaaaggttaatacggttacccgatgtgatgtctattaccgggttaaaacgttctactatttatttcaagatgaaagaagggaacttccctaacaatatccctatcggagaacgatccgttgcatgggtagagggggaagtaattaattggattgatggaaatatttcaaagagagaaatgagatgctaaaagaattaccgttaactccgcatgatgccgaaattaatgtgatatcaacgtatcaacctatgttgttcacccctgagcagggggatggtggttatgcgattcgagtaatagaaatctatcggttacataacatgttcccattgttggataaattcgaagaattaacgggatatgccgcacctaggcttgtttgcacgccagatgaaataaatatgttagtcgagcgaggacgtaagattaaccaacaggaagaagttaatgtaagaactattgaaaatgaattaaacctagtcggccgtgagctgggtaatgctcaacgaggaataagtagtttatcaagttacaatggcagtgtccgtagtttagttgcttctgttcaggcaaagtctgaacttacacaacgacgtttagctgatgcccaagataaactagcggctcgtagaggactattagggctgttacgtagtcatgttgaattgatgctgagccatagtgttaaaggattcaaaaataagattatggagttcttaccattagattctttttcatccaatacatacaaagatggttggagtagtactggattaaaatcacatgtatatgcatggaatgagctaaataaattagagttagcactgaaagagatcatatctaggtgcaccgtacctacggataagtatttaattgctcatggcggagttgaattatcaaaattaaagaaaaaatattatcagcctgagtcagagggaatgcgagattttatgtcggctgatgatttttctaagttaatgctgagtaaggaatcatgggctaacaacaaggttaaaattgcaaagcaacatttataataatttattagaactaacccctatattaaataaaggttaaaaataatggtcagagttaatcctcctgctatggcgggacagtttcatgcaaattttgttggtggaataaaatcacgatttgatagtgagaaaagtttttcaatatcggagtcagcggagaatcagttgcgtatatctatgctggaatccggttggatgatgaataatattactttatgggatgtagatgaagaagaaggacaaaatattgaaattggtgaatctgctttacatacaggacgaactattgaaggacgttttagccgaggattaaaaatagagggttctaactattcactcgcagatacggattcttgtgcttcgctttcgtatcaacgaatgagtgccattgctaatgttgggggtattgaacattttacccaaactgtttctgatttcttcggcatggctatttcattggatatgctgagaattggttttaatggtcaacgtatttcttatccgacagatccaattgctaatcctaaaggtgaagatgtcaatataggttggcacgcaatagccaaaggatttaataacggttctcaagttataactgacgccatgacattgggggagggcggggatttcccccatttggatgcgttggctaatcatattattactgaaaagatacccgaaagttttagggaagatccccgtttagtggtgatggtaggtgcagagttagccgcagcggaacggatgcgcttatttaactccgcagatcgtccggctgatattgcagcagcgcagatgttaacgagttcggtggctggtcgttttgcttttgttccgccatttatgccgggtaaacgcttggtggtgaccacattgagtaatctacatatttatacccaaaagatgagtagacgctttagggctgaatttattgatgagcgctgcgtgtatgaacacagttattggcgtaatgaaggctacgcgttaggtaataattctctgtatgcagcagtagatgaaaatgcaattagcttagtgcaaaggtcaggtagctaatgacaaattcacaattaactaccggctggatatgtgtggccacggaaggtgagacaatagacgggcgtcagattgaatcccaatggttggcggatatggccaaaatctacgatgtgcgcacctacacggcgctgatttgggaagagcatttacgtgatagggataatttaggggaagtgctggcgctgcgtagcgacgtacagaacggtattacccatctttatgcccgaatccgccctacggccaagctggtgagtttcaatgagcaggggcaaaagctgttttgctccatcgaagtggaagaagattttcaggacaaaggtcatttttatttaagtggtttggcggttactgatagccctgccagcattggcactgaccggttacgttttagtgctaaccgttcttatttttctaagcgtggtgttaaagcaaaaataagtaagccaagggaatttagtttatcagacgccactattatggctggtaaaggctgggtttccgcaatagcgctgagttaattcttatattacagataagaaatacccggctgctgggccgggtatggttctctactatcggaaaataacaatgataaataattcaattaatgctgatttgactatctcactcaccgttatttccgtcaataaaataggttcggatatatacggttatattactgacaaaagtatttatgctttaggttctatgccacggcgttttaattcctgccgggctagctctttaaaccaattaccaaggcttacgccatctttagccgcttccgcattaagttgttcacgcagttctggcgcgatacgaatttggaatgttggcgatagaccttcacctttcgggcttttatctcgttttatagttgacacgtacgtacataacctcataagctgtctttcgttaggtacgtacgttaacacggcgtaccgacaaaatacagcggcccgtcaaggtgctaccaacaccaagccgggcctgaccatcatgttagaggaactaacgcaatggctacgtcaaagtgtacctacatctttgcggcgatcaaccgcacccaacagaaaattagccctgtcatgctgcatatcaccgcagagaatgagaagacggcccgccgccgttatgccgcagattacatactgctttttgccgggcgtttgcctgtgcaggaggcatagcatgacgactaaatataatttagcgcagggaagtgtagataaagttctacgggccatgctggtttcagaattaatgagagagttattgtactcaaaaaatgaaaccccacagcctcatgttaattcagtcaatatagcggctgtctttgattgtatttatgaagatttagattctgtattggataacgaatttgacaggggaaagaatgaaagccgttaatttattcccgtcactgttatttcttttcatatttacaatggagacgccgcgatgagcagtcaatttgtctctgaaacgctgcaagcggcccgtgggcgttggccgcatattttgccagcgttgggtattaccgtgccggataatggtaaacacggcgcttgcccgaagtgtggcggtagtgatcgtttccgctttgatgatcaagggggccgtggcacatggatttgtagccagtgcagtcatggtgatgggctggatctcattcgtttggtttctggcaacggggcatttcaggcggcaactgaggtggccaaggcgctagccttaccgaatgcaccgcaggaagcgattaagcctgccagaaatgaaatccccgaagagcgaaaaaaggcgatggtggccaaggcttaccacgctttgctagcccattgcagcagcggagaaaacagttatctggctgataaggggctgtctggccatagccaatccattacgcaggatgttcataaaacgggagggatggacttcccggcaggttctttgctgttaccgctaactgatatcgacggcaagttaaccggtggccagcttatcagcccgttaggtgacaagcggttattgcccaataccgtacttaaaggggcgtttattgcggttcacccattagaggcaggggataacccggagctggttgttatcactgagggttatgccacagctttaacgctggatatgttaactgatgggctggttgtggcggcagtcgcggctaacaacctgccgaacgtggcgcaacacctgcgccataaatggcccgatgcgcggttgattatcgccggggataatgattttgatgatggtaaagagaacaccggcaagcagtgggccgagaaagccgctaaagcagtagatggttgggtatcactaccaccaacccgtcataaagcagattgggatgattaccgccgtgataacgggctggaacgggctaaagaagcctttcgggaagaaatgatcctgtttggtaaaggcaaaaccaaactgccgcaggggttccgcttaacgcaggaatatctttggtatgacaagttggtgaataagtctgatggtgataccgaaatccgcaatatcaaactgtgcagcccggtaagagtcacggcgattacctgcgattctgacggcggcaactatggccgcttgctggaatgggaagacaccaacggtatcagccgtaagtgggccatgccgatggagatgctcagtagcagcggggaagagctgcggcgcattctgttgagtaatggcctgtcttatatcagtaccaccgggcaggcgcgggcgcatttgatggaatacctttccctgtgcaagccagagcgcaaggtaacttgtgttaataaaaccggctggcatggttcggtttatgtgctgcaagacgaagtgatcggcgttggggctgagtcggtaatcttacaaaccgccagcgtacaggggcgggatttcaggactgccggaacactggacgaatggcgcgatcaggtttcccgttattgcgtcggtaatggccgggtggcgttttcggtcagtctctcttttgcctcaccactgttaaaattggtcggtgtgggcggcggtggttatcacctgaaaggggaatcaacggacggtaaaaccaccacgatgaaagtggcagcttcagtttgtggtggcactgacttctggcatacgtggcgctccaccggtaacgcgctggagggcaccgccagccgccgcaatgatgccaccctaatgttagacgaaatacgggaagtggatggcagagaggccgggaatatcgcctatatgctggcgaatggccaagggaaagcgcgggcgcgtactgacggcagtttgcgcgaggctaatcgctggtgtctgttgtttctgtctactggtgaattgtcgttagtcgaacatgcggccaacgccggagagcgtacttatgccggggtggaagtacggatggtacagatccccagtgattccggtaagcatggtgtatttgaagagctgcacggttttaccggaggtaaagccctgtcggagcacttggaacaggcggttgcttcctgctatggcgagccgttccgtgcttggttgcggctgttaaccgcagacctgaccggcatgaccagcaaggccaagatactgctaaaagaatacacccggctgcttaccccggagaacgccggtaatcaggtgggccgcgcagttacccgttttgcactggtggcaatggccggagagttagccacacaagtggggatcaccggctggccagagggcgaggcgttccgggcagcacaaacctgccttaatgcgtggatgggggatcgtggccacaccgccaatcaggaagacgccgccgcactggaacaggtgaaagagttcattacccgtaatcagttcagccgctttgctgactggcatgacgagcgcagccgcccggctaacatggtgggcttccggcgagtggataaaggcaataacaaagaagatgcggtgacaactttctttattttggccaccggttggaaagaaatctgcaagggatttgatgccaagaaagtggctcaactctgcgtcaaggccggttatctcgatgtgccagaggatgcccggacacagaaaaacattcgcctgccagaaatggggctgaaacgggtctatcagtttaatagcacggttttaggttaatacacttacgtgagtcttatttagaactggtaacactggtaacagaggtaacaaccataagccgcaaggggtagagctgttaccagtagtagagggctattggtaacactggtaacagaaatcagcctgttaccactggttaccagttgataatgcctagtggtaactaattttatctatataaatcaatggtgttaccagcgttaccactgataccagttacagacgtaagagacaatataaaaacgagtcagttcgaggcttattttctggccggcggttctggctttaaatagaggggccatatcaatatgcgagtttttaaagttatttgtccagattgcggtacacccgctcatattcgtaaaactaaccgcaagcatagccatatagcggatctctattgtgcctgtaccaatgttgaatgtggccatacctttgtgatgaatgcgaccttttcccatacccttagccccagtgcgttaacgcatagccggttaattaaggacttggtagaccatatatcaccgcaggaacggcaagaggctatccggctattgcaagtggcccataaagatgaggaacaacagcaggcaatcagtgacgcaaaaccgcaaattacgcgcagggtgagcaaggattacgtgaccaaccgttagcccggtgttaccactctggcgctcgattttcttcccggccctgtactgtgtttttcagttagcccaaaatgaccttgccccgcgaagccacgcccggcaagggtttcaacatttcccccacgctattatctcacccaacttttcccatcctcgccacgtaaaataaaatacttgttttaaatcatatgattaaaactttaagcggtaaggttagaaaaagcgaaactgaaatttagtgaaattcttttcaatcttttcagttgggattatcagccagagccccagccacggcgcgggctggcgctagggtttgtaggaatataaaactgaaataagtttataaagcaaagtgtgcaggcgggtgcggtgtagtgccatttccgtcatatttatatttttccatgaaacgatagagaaattcagtcaattagttttatcaacttgaattgattatttgatccgtgtcacagcagaaaatttacttgcaatgtgcatgatttttatacttgaaattgctttcaataagaattcttaatgagtaatgtaacttactattactgaaaataaatcgaggtgattatgtcgttacagctcttaagacaagccattcaggctcgtaaaccaatttcatttgaatataataagcctggaaagattccgggtgaacgaattggtaatcctcatgctatttttattatgagaaaaaaagaccaatctgagtctacaaaagtacatatagttcaagtgggcggtgtcacagatagcgcacctaatttcccagagtttagactgtttgatattgctgaaatttcaaacattaaaattattgatgcaggtgctccatttgcaattgatggtggctataatcctcattgggatggatataagaatgtgattgcgaaggtataatatgagcattgaccattcatatttgattggaagagatgatgttaatgatttggtattaaatatatcaggtcttgatgcagactctagggatgtatctacgttaagtgcaaatatttttgctcattgcactagcactggatctccaaaatttacttgccaattaaatattggtcatttgcaaagtctttatcaacacctttcacaatatagtgttattcgtgatactgagtctgtaagtactggtcgttttatagagatccaaagcaatcatgaggaaataatgagagttttggagcattcggataacacttctttagtattagcattacagcacatcgtaagtaatagacttacaaatactgatattaatacgattttagggcgaaaagatgctcttgatgagtatgagcgaatgtatgaaaatgctaattattataatgaaatagaatggcagcgtttttttgaaaggaatgagtggatatttgggtatggtttaaattataaatatttaaaaatcctacagagagaagcacacatctctcatacagatctcaatgggtctaatgatgttataacggattttttattatcagactctagatttactaaaattgttgaactgaaaacacctacaacaaacttatttgtcaatcgccagaatagagctgattcttggcgcttatcaagtgagcttactgatgctgttagtcaaatattggcacaaaaggcaaattgggaaatagaaagccaaagaagtaactacacctctgatggggatttgataagagaagaaacacatgatgccgaatgtatattagtaatcggatctatatcttctattagtgggggtgaccgcgaaaagttaataaaaagaaaaacactagagctttatcggcgtaatttaaaaagtattaacattctgttttatgatgaactattagaacgcgctcgatttattgtaagaagcgccgaaattattgaaaatgccattggtgaaattttagaataaacatcaggcggcattcttatttctgtaccatcaatatacaaatatggtgctagtataaattatcactataccactgcaacatatccctacgtccttcaagatattgtgcatggttataagttccacggatggaatttttatcaacatgggcaagctgggtttcaatccatgcactgttatagcctttctcatgcaagatagtgctcatggtgtgccggaaaccgtgaccggtggccctgccgtgataacccagcatcttgatcaccttattgatactcgcctcactcatcggcttaccggcatcattgcggccggggaacactaacttataattccctgtcagcatctttagcttttcaaggatcgccaaggcttgtgcagaaagtggcacaaggtgagggcggcgcttcttcatccgttctttaggaacctcccacaaggcattatccagatcaaattcagaccattcagcggcccgcagttctatagttcttacgcccgtgagcattaacaactgggtggcgtatttggtcagtttgctgcctttatagttatccaatgcctgaataaattcgggtaactcactttcagtcaggaaagggtaatggccattcttggggcggtttagtgcgctggccagatccggggctgggttataagtggcccgcccggtcactacggcatagcggaagacttcaccacagcgccgcctgattttcccggtgagttccagtgcgccacgtttttcgatacgttgcagaacggccagcagttccaacggcgcgatctggtcaattgggcgcttgccgatataaggaaatacgttgttatcgaagccacgcataaccgtatccgcatattctggtgtccaagtgggtaatttggaggtgtgccattctttggcgatagcctcgaacgtgttggcgtgggaatgctgtagggctatcttttcagctttgcgggcatcactggggttaatgctgttggccacttgtgctctggcctcatcgcgtttcttacgagcatcggctaatgaaatatcaccatacaggccaaaagatatcattttaggcttcccggcaaagcggtaacggaagcgccaacccttggagccattgggttcaatcaatagggataggccattgccatcattcaaggtataggctttatctttggctttagcccggcgaatttgaatatctgtgagtagcatgtgtatagccctaaagatcgaacctagtgttatacgcaatcctatacacatatgtgtttagattccactaaacattatggggtctctttagacgccaaatgtctatttatcgttgttttaacaggattttatggacttagtgggatgtgctgagaagtgctaatggtgtccccgactggaatcgaaccagtaactagcccttaggaggggcttgttatatccgtttaactacggggacatgccatgatttttgctgttgataaaagcagctgggcgtcattatacctattttcactctgaaaataagcagttagcggtttgtttgtttaaattgtcgccagttatcgcttaaaaatgcttatctcccaatgcgccagagaatgctggctccgatcggcggttagatttactttttgtacaaatccgtttttttctgggtatttcctttagattttttgggttttctcgtcatatcgctgcgtatttgggcatggcttatcagagcaaatataaaggaaccaccgatgatattgccggcaagcgtcgggatagcgaaggggtaaataaattcctgccatgaaagattgccgctaaataccagatagaagatctctgctgagccgacgacgatatgagtgagatcgcataaagccaccagataggtcattaagaaaatcacccagattttagccgcgccagcagagggtagcatccacaccatggtggcgataatccaaccggagagaatgcctttagtcaacatttctgctggcgtattttccataatatcctgagcaatgctgataaaagcggcgtgcgtcgcgtcatcaaacaagggaatatggataaatgatcccgcggccaaggcggttccaattaagtttcccagcaacactaatccccaaaggcgaaataaaatactgaaattcttaatgctgggtttttgcataattggcagtaccgcagtgacggtgttttcagtaaacaactgctggcgagccataatgacaataataaagccgaaggtataaccgatattctcgataaaaaagctagcgggcgcatcggataatctggcgtgaaaaatgcctttcgccattaaagatgctcccatagataagcccgcagcaatggccgatagcaatagagccaagccgtcgcgctccagttctttttcgccttcgacgcgaatttgctcgtgtattgcggccgcgcgtgaagggagatttttctcattaacatcaatctcttttccctgctttttctcattgctttctacctgaatatcgccatcgttgtttttatggtcattcatgtttttctcctgaggaaaccggattaaattttcaaagttgatagacgggaggtcctcgattccattattaaggatagtggcttttttacggcgaatattgagatgggaaagaagcgattattgagaaaggaaccgaaacagtcagcaaaagtcagctttggctgttttttctacagaatattgatcttatgccgaatattaactctataaggttaggtttcgggataggcccatgctacgtaagggttaggccttatgctattattccggttcccggttgttgaaaatcttgcggttaaaagacgaatcccatgttggaagcgaaaaatctgagttgcatacgcgacgaacgaaccttatttaagggactgagtttctgtatcaaagcgggggatatcgtgcaggtggaaggccccaacggagcaggaaaaaccagtctgctgcggattttggccggtctggcgcaggccgatgctggtgaagttcactggcagggagcgaatatcctgcgggatcgcgcgggttatcatcaggatttattatttctgggccatcagcccggaataaaatcggtgctcacgcctttcgaaaacctggctttttatcaatcggctcagggtgattttgacgaaaatgccatctggcaggcgttagaaaatgtggggttggtcggctatgaagatttgccggttgcccagctttctgccggtcagcagcgccgcgtagcgctggctcgcttatggttgagtcaagccccgctctggattttggacgagccgctgacggcgattgataaacagggcgtaagtgagttgatcgctttatttgagcaacaggctgcggcagggggaatggtgttgttgacaacccatcaggagcttggcggcgtgcgtcagggggtaagaaaaatcagcctgattgactcggggaaaaactgatgtttgtcagcgtattacgtcgagaattaaagattgcgttcagaaaaggtgcggagattgttaacccactgtggttttttcttatcgtcattaccctgtttccattgggcgttggtccagagccgcagttgctggcgcgtattgcgccaggcatagtctgggtcgctgctttgttggcttcattattatcgctggaacggctgtttcgggatgattttctcgatgggtcgttggagcaactgcttttattaccttcgccgctgccgctcacgatgttaggcaaagtgtgtgctcactgggtcgtgaccggattgccgttgctaattctctcgccgctggtgggcatgctgctttcgctggatgtgaataccggcatcgccgtagcgctgactttgctgctggggacgccgacgctgagttttatcggggctatcggcgtcgcgcttacggtgggattgcgcagaggcggagtattattaagtttgctggttttacctttatatataccggttcttatcttcgccaccgcagctattgatgccgcctcaatggggatggcgattgatggatatctggcgattcttggcgcgatgctggccggtagcgctacgctggctccttttgccacggcggctgcgttgagagtaagcattcattaatcctatttaaatttacagattttgtctgatgaattggggcgatatctggcgaccatgcagtgacgcatcagcttgaaataacatattttttattgaatgtggtagccaacgccatttagagcagattgcgcaccgcaacccgtatcggcttagttagcaggataattaccaagacgattactgtcatttttatagtgagcaatgaccaacatgtggaaatggtttcatcaatttgcccagcctgaaaggctgtacagagtctgcggtcgctttattccgtggttcggcgcagcggccatcatttgtctggctatcggttgggggggaggctttggcttcgcaccggctgattatcagcaaggtaacagttttaggataatgtacctgcatgtgcccgcggcgatttggtcgatgggcatttatatgtctatggcgatagccgcctttatcgggctggtctggcagatgaaaatggcggatttggccgtggcggcgatggctcctgtgggggcggtatttacctttattgcgctggctaccggttctgcctggggaaaacctatgtggggaacctggtggttgtgggacgcgcgcctgacatccgagttggtactgctgtttctgtatatcggcgtgattgcgctgtatcacgcatttgacgatcgaaaactggccggtcgagccgccggtattttagtattggttggcgtggtgaatatacctatcatccatttttccgtggtgtggtggaataccttgcatcaaggctctaccgatatgcagcaaaccatttatccgaccatgcgtactccgctgcgttgggcaatcttcggctatctcttcttttttgccactcttacgttaatgcgtttacgtaatcttattttacatcaggagcgtcatcgcccttgggtggcggaattgttaggtaaggagcgctcgctatgacaccggcattcaactcttgggcggattttttcgcgatgggtggttacgccttttatgtctggctggcggtggccgtgaccttgctgtcgttgcttggtttatgggcgcataccctgtggatgaaacaagggttattgaagagtattcgccgccaacgtagacgcgatcagcgaattcgtcaggcgcagcagcgggagagaaaataatgaacccacgtcgaaaaagccgtctgtatctggccttagtggtattaatcggcataggtttgaccaccacgctggtgctttatgccttgcgagccaatattgacttgttttataccccaggcgagattttacaggggaaggggcctaagcacgaaaaacctgaggttgggcagcgtctgcgtattggtggaatggtgatgcccggttcagtaaaacgcgacccgcagagcctacaggttacttttaaggtgtatgacgcgcgcggtgcgatcgacgtgacttacaccggtattttgccggatctgttccgcgaggggcagggtgtggtagctcagggcgtttttgctgaagggaatcgggtggatgctaaagaagtgctggctaagcatgatgaaaaatatacgccaccggaagttgctgaagcgatgaaagaaaatcacgttcgtccggcggcggcttataccaacggtcagaacgaggggaacgcttcatgatgcctgaaatcggcaatttcctgttatgtctggcgctggcgatatcgctgctgctgagcatttacccccagtggggagcggcgcggcaggacgcgcgaatgatggctgtagcacgaccattgacctacggcatgtttgtgaccgtcgcgctatcgtttatgtgtctggtctatgcctttgtagtgaatgattttaccgtttcctatgttgcggctaactccaatagccagttgccggtgtattaccgaatcgctgctacctggggggcgcatgaaggctcgctattactttgggtgttgttgttaagttgttggtcgctggcggtggcattattcagccgtcaaatgccgcaggacgccgtggcgcgagttttatccgtattaggcatgattaccggcggtttcctgctgtttatcatcatgacttctaaccctttcacccgaactttgcctaatttcccgatagatggccaggatttgaatccgttgctacaggatgtcgggctgattttccatccgccgttgttatatatgggatacgtcggattttccgtggcgttcgcttttgccatcgcatcgttgatggcggggcgtttggataccgcatgggcgcgatggtcacggccctggacccaggcggcctgggtattcctcactctggggatcgtgctgggttctgcgtgggcttattacgaattgggctggggcggttggtggttctgggatccggtagaaaatgcgtcatttatgccgtggctggccggaaccgcgctgattcactctctggcggtgacggaaaaacgcggtactttcaaagcgtggacggtgctgctggcgatcacggctttctccctgtgcttaatgggaaccttcttggtgcgttccggcgtattggtttcggtgcattcttttgcctccgatccggcgcgaggtatgtttattctggcctatctggtgattgtgatcggcggttccttactgttgtacgcggtgaaaggggcgcaggtacgcagccgtactcagcatgaagtgttctctagagagacatttttgttaggaaacaacgtattgctgatcgcagccatgctagttgtactactggggactttgctgccgctggtacataaacaactggggttggggagtatttccatcggcgaacccttctttaataccatgtttacttggctgatggcaccgttggcactgttgctggggatagggccgttggtacgctggcgtcgggatgaaccgagcaaattgtggcgtcgtttgggcgttgccttggtggcaaccacgttactgtcaattttagtgccttggttaatgcaggacagtatcgccggaatgacggtagtgggtttgatgatggctttctgggtcattattctgacgctaatggaattgcatgagcgagcaacccatcgccacggtttctggcgcggcctgactcacctttcccgcagtcattggggcatggtattagggcatctgggcgtggcggttacggtaattggcattgcctttagtcagaattatagtgttgagcgcgatgtccgaatgaaatcgggagatggtattgatatccacgattatcactttgttttccgcgatgttcacgacattaaaggaccaaactacaccggcggcgtaggtatcatcgacgtcacccgcaacggcaaacccgaagcgacgctgcacgcagagaaacgttattacagcacagctcgctccatgatgaccgaagcggctatcgacggtggcctgactcgtgatttgtatgcggcgttgggggaagagctagaggatggttcctgggcggtgaggttatattacaagcctttcgtccgctggatttggtacggcggagtatttatggcggtgggcggtattttgtgtatgttggacccgcgctatcggatgagtaagaaattaacgcgcggtatcgcaccggaggtacagtaatgaagtctaagttattgtttattccgctggtgttgttcctgctgctggtggtggcatttttagtgcaactgagccgcaatgccggaggggaagatcctacgatgctagaatcggcgctgattggtaaacccgttccgacctttaagctggaatctctgggtcaggcaggaaaaacctacgatcaggcggtactgcacgatggtaaacctatgttacttaacgtgtgggctacctggtgcccgacctgccgcgccgagcatgaatatctgaataaactggcggcgcagggaattcgcgtggtcgggctgaattataaggatgaccgtgccaaagcggtgaactggttgaatacactagggaatccttacgcgctgagcttatatgacggtgatggaatgctgggattggatttaggcgtttacggcgctccggaaacctttctgatcgacggacaaggtatcattcgttaccgccatgcgggggatcttaacgatcgcgtctggcagcaggaaattctaccgttatataaaaagtatcaggagggcgcatgaggctaatcagtctggccctcggtatgttactgagctggggcgcgttcgcagccattgatacttatcagttcagttcggttcaacaggagcagcagtatcgggaattaaccgagcagctgcgttgccccaaatgccagaacaacagtattgcggattctaatgccattattgccgcagatatgcgcaataaagtgtatgaactgatgcaacagggtaaaaccaaacctgaaattatcgattatatggtggcgcgttacggcaattttgtcacttatgaaccaccggtgactgccgctacgctcattttgtgggtggggccagcgctgtttgtgctgatcggcggggcggtcgtcattttacgcgggcgtcgccgtaaccagatgcttgctgaagacgagttaccggagcaggaacggcagcgtctggctgccatactggcgcagaatgaagcggaaaaccggaatgtggcaaatactgacgggaaacaaccataatggctttttggctaatagtaatcattgcgctggccggagcgggtgccctgttagtggttcctgcaatgaaacaaagcaataataaccgcaaaactacgcgggatgatctgaataaagctttttatcaggatagattaaacgaactggcagaagacgaagcgcagggcgtggtcaccgagcgaccggaactgatcaaagagctacagcagaatctactgacagatattcccgagcaaccggcggaacaatccagcccgatcagtcgttgggctttgttgcccggcgtggtgattttggtattggttgccataggattttatgtcaaaaccggtggtttaacccagttgcacgcgtggcgggaagtacaggcgcaaatgccggagttacgtgccagagttgccaatgaacgagcagagccgctgacgatggaagaagtggcgcgcttgggtttagggctgcgcaccgctttgcagcaagacgataacaatgttaacgactggatgatgctgggccgagtgggtatggcgctgaataatgcgactaccgcgacgcaggcgtttgaaaaagcctatcagctcgcgccggataatatggacgtgaaactaggctatgccgaggtgttaacccgttctaacgatccccaagataaccagaaagccacgcaaatgctgcgtagcatgttggcgcaggatcacggtaacccgcgagtgttgagtctattagcatttaatgcctttgagcagggagatttcaaacaagccattggcgcgtgggaagttatgctaaaattgctgcctgccggcgattcccgtgctgaagtaataaaacgcagtattcagcaggcaaaagcacagtccggtcaggaaacagctaaactggaagtgacggtttctttgtctcccgatgcggctaaaaaattaccgcagcaagggactctgattatttcggtcactgacggagtgagtccggtgcctgtggccgttaaacagctgccgctgagccgattcccactgacgttatcgctggatgacagtaatgcgatgatgccggaatcgttgctttctgctttgcatcaggtaaaagttcgggtgcgtttatcgctggacggtacggcaaatcctcagcgcggtgactggtttggtgaaagcgtggtacaggaattcagcggtaacgggcagattagcgtccagataaatagacagatcccctaagcgcaggggctgaacgtaatttcatggagaaacatatgaattttcgcctgacagggctggctttcgcgagcgtattattggtgggttgcgccagttcttcaccggatcagatggaacaaggccgctccgatccgttggaaggttttaaccgggcgatgttcaactttaactatgaggttcttgacccttatgtagttcgccccgttgccgtagcctggcgtgattatgtgccgcagcctgcgcgtaacggcgtgagtaactttatgggtaacctggaagaaccggcgagcatggtgaacagcttcctggtcggtgacccgtacaaagcgatgaagcactttaaccgtttcttcctcaacactttattgggtatgggcggtctgattgacgtcgcgggtatggctaaccctaaactggcaaaagaagtaccgcatcgtttcggtagcaccttaggctactacgatgtgccttacgggccttatgtggtgttgccgggttatggcagctttaccgtgcgtcaggaaggcggcgactgggctgataacgtctatccggtgctgagctatctgacattctggatgtctgcgggcaaatggatgattgaagggattgaaactcgtgcgcaattgttggattccgatggtctgttgcgtaattcctccgatccgtacctgatggtgcgtgaagcttacttccagcgtaacgatttcctcgccagcggcggtgtgttgaaaccggaagcaaatccaaatgctcaggcaattcagggcgatctggaaagcatcgactcagccaactaatcagtttgatatatcaaaacgggttgatatataaaagcggattgatatgtgacagataaaaaaagcgccttcaggcgcttttttgttgccgcgaattcgtcaacttcccgattcagggcgcacagtcggataatccaccctacggcgcattatccggctgatttggggttagaacgcgtagttaaagttcacgccgtacagcattgccgtacctttggagttgaactcgtagttcgtgccgcccaatgctggtggcgttttctcgttgatggtcacgttctggccgtgcatgtaggagatacccacgtcaacagatgcgtctttgttgaacgcataggtagtaccggcactgatccagaaacggtcctgatcggggatcgaaatggagcggttttgagctggaaccgggctatcatcgaacgcgataccggtacggaaggtccagttatcgtcgtagtaataggttgtacccagcgcgatacggtatgcgtctctaaagccttcgtgcttctcgaacagtaccttaccgttgttacctgtggctttcagctcctggaattggctccagctggtgtaggccaggctatagtgaatcgcccactgcggtgccactttgttataaccggacacttcccagacttctggcaggttcagtgtcagagcaccaggaacgattgcaccgccagttccgccaaaggctactggtagctggttgctgtaatcgccatcaaagtcgattttcactttagaacgataagtgaagctgtagcgattttctttatcgatttcataaagcacgccggcgttccagccgtagccccactctttaccttccatattggcaacttcggtacgcgctggcagacctaaacggccacccgcttcaccaatgtgacgcacaattttcgcatcggcataaacggcgttgaagcccagaccgaagctgaagttttggttcagacgatacgcagccgccaggttcaggttagcggttttcagatcggttttaccgcctagtgagccggcgatatagtcttcattaaattcggtggctaaaccgtagttggaagtaccggatgcgccgatagcccattgttcattcagcggcataatgaagtggatgttaggaatccactcagatggcgcgatatttttagcgtcggtgctgcggcctgtcagcggagattgaccgctgatatctacgttagggtcaacgtagacaaaaccgccggagaatgaaggacggtcaaacatcgtcatagctgctgggttgcggctacctacggatgcgttgtcggcgacggcgccttcaccagagaaagaacggcccaatgcagccgctgaatattcattcagctgaaaaccggccgcagaaacgttcgaagaaataattgccactgcagctgccagagctgatcgggtaaacaggtttttctggttcatgaccaaaacctcattttaatgtgtttattatttaaactatgttacatagcgtaacaagagagcgcgggattgtagggtccgttaccaatctgacaaatcagaccagtggctgaagtataggtctgacctgtaggaatgttgcaagaatgtttttgaaattgattgaaattgattgcaaaaaatagatccacttaacaaaaaacttacatgcccatatcaataaatctatgacttattatttttgcgatgctttaactgagattttcgtcactaaataggcacataaacagtaagttctagtgatgcggggtttgcaggagtaaaatagcggcagatatcgatttttgagccagatcacaaatggcaatttgcacctatttgaaatgtcccttgaggagaattgaagatgtcagatgcaattaaacgctgtaatgcagaagaaaccgcagcctgctgctgcgtagatgtcggtactgtgatggataacaccgattgtaccgcgtcctacagcaaggtattcgccagccagagcgaagccgaagcaatgctaaacaccttgatcgaaaaagcgcgttccgtcgaatccgacccttgcctgattgagccaagaatcgagacggtagcagaaggtgttcaactcagcgttgattttacctttgcctgtgaagcagaaatgctgattttccagctgggtctgcgttaatctggccgtatttagcgcggagctttcgctccgcgctatttaatcactgaatctatttccttattattctttctcccgtctattcgttttcctctttccctatctctcttttttattctgaaagttgctcctgctcgcatttttggcctcaataggtttgccaaatgtaaacgtttggttaacaataatcggatcaggtcagacctgttaacctagcatcctaataaatgccaatttatctctcaggagcctttatgagtaagccacttccgttagtgacgcgtcagggcgaccgcattgcgattgttaacggcctgcgcaccccgtttgctaaacaagctaccgcctatcatggggttcccgctgttgatttgggtaagattgttgtcagcgagctgttggcaaaaagtggaattgcacctgagttgatcgatcaactggtatttgggcaggtggttcagatgccggaagcgccgaatattgctcgtgaaatcgtattgggcaccggcatgagcgtacacactgacgcctatagcgtctcccgagcctgtgccaccagttttcaggcggtggcgaacgtggccgaaagtcttattgcggggtcggtggggatagccatcgccggcggcgcagattcttcctccgttttacctattggcgtcagcaaagcgctggcgcgtacgctggttgacgtcaataaagcccgaactttgtcacagcgtctaaaactattcagtcgtttgaaattccgtgatttattgccggttgcacctgcagtggcggagtattccaccggtttgcgtatgggagataccgccgagcaaatggctaaaacctacggtatcagccgggaagatcaggatgcgttggcgctgcgttctcaccagctggcggcggaagcctggcaaaaaggctatttacaggatgaggtgatgaccgcttatatcccaccataccgtgcggctatcagtgaagataataatgtgcgcaaagattccaccatggcgcaatacgctaagctgcgcccggcattcgatcgcaagcacggcagcgtaacggcggcaaacagcacgccgctgactgatggtgccgcagcagttattatgatgagcgaagggcgagccaaagaattggggctgcaacctctgggctatttacgcagttttgctttttccgctatcgacgtctggcaggacatgttgttagggccgtcttatgccacgccgttggcattagatcgcgctggtatcacgctggcggatctgacgttaatcgatatgcacgaagcctttgccgcgcaaacgctcgctaacctgaaaatgtttgccagcgatagttttgctcaacaatatctggggagaagtcaggcgataggcgaggttgatatggataaattcaacgtcttgggcggttctatcgcctatggtcatccttttgcggcaaccggagcgcggatgatcacgcaaacgttgaatgagctgcgtcgtcgcggtggtggattgggcttaacgaccgcctgtgccgccggtggtctgggtgcagccatgattgtagaggtggaataatggaaaatcgcgtagaacagggcaggggagacgccacaatgccttcgaccgagtcggtgtttcagctcagtattcggccggataacatcggagtcatcaccatcaatgtccccaatgaaaaggtcaacaccttaaaggctgaatttgcagagcaaattgcccaagtgctgcaacaagcgcagtcttcgccgcaattacaggggctggtgattgtttcgggcaaaccggattcatttattgccggagccgatatcaccatgatcgccgcctgtcgcaccgcgcaggatgccagggttctggcgcaaaaaggccaggcaacgttagcgcaaattgccgcgttcccgatccccgttgtggcggctatccacggagcctgcttgggcggcggtctggagctggctctggcttgtcatggccgcgtgtgctcattggatgataaaaccgttttggggctgcctgaggtccaattagggctattgccgggttccggtggcacgcaacgattacctcgattgatcggcgcgagcaaagcgctggatatgatgctgactggccgccagattcgcgctaggcaggcgctgaaaatggggctggtggacgatgccgttccgcaggatatcttgctggaagtggccgttagccgtgccaaagctggttgggtggataagccaagtctgccgtggcaggaacgtttgctgaatgggccgctaggaaaatctatattattcaatatcgtgcggaagaaaacgttggcgaaaacccaaggccattatccggcggcagaacacattattcatgtcgttcgccaggggctggataacggcggcccgagcggctacgaagcggaagctcgggcatttggcgagctggctatgtctgcggaatcagcggcgttacgcagcttatttttcgcgacaacgtcattgaaaaaagaaagtggctcaacggcacaaccgcgcaaaattagtcgggttggcgtgttgggcggaggtttaatgggcggcggtatcgccaatgtcactgcgacccgagccggtttaccggtgcgaattaaagatattaatccgcaaggtattaatcaggcgctgaaatatacctgggacgcattgggcaaacgggtacgcagtaaacggctgcgaccaacggaacggcagcgccaaatgatgctgatttccggcactaccgattacagcggcttcgacaatgtggatatcgttgttgaagcggtgtttgaggatctggcgctgaagcagcagatggtggccgacattgaggcgcacggagcgcctcatactatttttgcctccaatacttcatctttgcctatcagccagatagccgccgaggctaaacgtccagaacaggttatcggtttgcattactttagcccggtggacaaaatgccgctggtggaagtgattcctcacgctggaaccagcgaagaaactattgcaaccacggtggccttcgcccgcaaacaggggaaaacggcaattgtggtcggcgatcgcgccggattctatgtaaaccgcattcttgctccctacattaacgaaggggcgcgctgcttgctggacggcgagccgattgagtcaatcgataaggctttggttgattttggcttcccggttgggccgctgaatttactggatgaagtcgggatcgatgtgggcaccaaaatcatgccgattctagtggaacagctcggctcgcgctttgccgctccggcttctctggacgcaattttaaaagatggccgtaaagggcgtaaaaatggccgtggtttctatctctatccggccaaaacttcgggctttaagctgaggaaaagccccgctaaacaggccgatccgaacgtttatgggctattaggcgtcacgccgaaagcgcatatacagcgcgaagttattgcccagcgctgcgtgatgatgatgctgaacgaagcggtacgctgcctggatgaaggcatcattcgtaatccgcgtgatggcgatattggcgctgttttcggcatcggttttcctcctttcttaggtgggccgttccgttatctggatcgtctgggtctggatactgcagccagaaccatgaagctactggaacagcaatacggcgagcgttttgccccctgtgagcgtctggtggcgatggcagagcagaaggcggtgttctacccggaaactgaggtgccagcggaagagtctactgcagcagaatgagtgtaaatccgaaggcattctgcgttcagaatgccttttggttagaatgtgagcgggatcaccgcctgtaactctgctgtttttacctgctgtacaggtgccagtgctcgcgttaccttagccttaatttactggctaagatttaataagcttttaagttagtagctctacattgtgtagagaataaataatggattaaactgttgagtaggctatttattaaacagtaatggttggcggtgcgttttgttggtgtaaaaacagccgttttatttacgtggagtttcaggcaaaatgcccggccgccatagagagacggcgcgttatcgtgatgaagttgctttgtcttagggcaaagttctcggcggtacagcacgcgttgcgtttctgtatagcgttattttgttaacaaaagcggtgcaatatgcaagttctaatcatgcgtcatggcgacgcggctcttgacgcagccagtgatgcacagaggcctctgacccaatgtggcagtgaagaatcacggcagatagccgcctggttaaatagccaatcggtggatattgagcagatactggtcagcccttatctgcgtgcggaacaaacccttggcgtggtaagagaagcgctgactctgcctgacgggcaggaagtgatgccggaactgacgccgggtggggatcctgcgatggtggcctgctatttgcaggctctggccaaagaaggttgcgcttcagtgctgctgatttcgcatcttccgctggtgggctatttggttgccgagctgtgtccgggtcaatgtgcgccgatgtttgcgacttccgcgatggcctgtgtcgatttagacatgaacagcggaatgggcaagttggattggcaagtgagtccctctcagctgatggccaaagtctgacggcttgtgaggatgacctgaaaacaggttagcggctgcggtgtgatacaaacttctgccttctgccttctgccttctgccttctgccttctgacccaaaaggccaaaagcacgattaaccggcatcattaataaaggcgtgaacagttttgctgtcgcgcctttatttttttggctaattcactattgggttaacttattcggctaattcgatcaaaaccagcaaggcggcggtgccaccccattctttcggagcctgatgaaacgccaatacgtccggatgctgcgctaaccacagcggtgtctgttgtttcagaacgtgcttaccgtgtccgtgcataacgcaggcgcagtgtacgtgttcgcgtttacaggctgccagcaaggcacccagctcttgtttggcctgcttttgcgtgagcccatgcagatcgagaaacatttccggtgagtaatcgccgcgtcgcagcttttttacttcaaaatgatcgactccggggcgcacatagcgtgtggggccttcgttatcgatatgcggttggaattcatcagagaagtaatagctggcatcgacctgctcttgtagcaggcgtaccggcgtaattttatgcgctttctgtggtgcctgacgatgcaggatggtgtcctgtttgagttttttggctcccgcgatcgattccctgaaaagttgcagctcctcattgctcaagtgaaatttatttttcattatttattcttagtacctaatcaattttctcagtttacctgctggatgttatctgtctaaataaatgtcgacaaagttttgcacccttttggcatattttcatcgcttgcgtatcattcacatgtgtatagctgctgatttgtcgcgggcttcatggcaaactaggcgcataaaccttgattttacgcatacctgttggagaataaattggacaaaattttcgtcgatgaagcagtgaaagaactgcacaccattcaggatatgttgcgctgggctgtcagccgttttaacgcggctaatattttttacggccacggcacggataatccgtgggacgaagccgttcaactggtctttccaactatctatcttcctattgatattcctgaagatatgcgcaacgcccgtctgacatacagcgagcgccatcgtattgttgagcgggttatccgccgggttaacgagcgcattccggtcgcttatctgaccaataaagcctggttctgcgggcaggaatattacgtagacgagcgcgttctggtgcctcgttcaccgattggtgaactgattgaaaaccgttttgaagcgctgatttcacatcagccaaaccatattctggatatgtgcaccggtagcggctgtatcgctatcgcctgcgcctacgctttcccggaagcggaagtggatgccgttgatatttcagcggatgtactggcggtgactgagcacaatattcagcagcacggcgttgaacatcaggttacgccgatccgttccgatcttttccgcgatttaccaccgattaaatacgatttgattgtgacaaatccgccgtatgtagatgaagaagatatgtccgatttgccgcaggaattccgttttgaaccggaattgggcctggcggcaggctttgacggattgacgctggcgcgccggattctggcctgcgcccctgattttcttcaggatgatggcgttctgatttgcgaagtgggtaacagcatggtgcacttgatggatcagtatcctgacgtgccctttacctggctggagttccacaacggcggtgacggtgtgtttatgctgacaaaacagcagctcattgattgtcatcaccatttcagcatgtatcgtgactaagcagtagacacgtttgtgcctgctgtaatacttgccggcgagatcgctctctgaccggcagacggattttgactcatgggtaaggagccgtgatggctgggaatagtattgggcagtttttccgcgtcaccacttttggtgaatctcacggcatcgcgttgggatgcataatcgacggtgttccgccgggtattccaatcaccgaggcggatattcagctggatctcgaccggcgtcgtccggggacttctcgttacactactcagcgccgggagccggatcaggttcgtattctgtccggggtgtttgaaggggtaactacagggaccagtattggcctgatgatcgaaaataccgatcaacgctcgcaggattacagtgcgatcaaagacgtgttccgccctggccacgccgactatacctatgagcaaaaatacggcgtgcgtgattatcgtggcggcggtcgttcatcggcgcgggaaaccgcaatgcgcgtcgccgcaggtgccatagcgaagaaatatctgcatcagaaattcggcgtgacggtgcgcggttatcttgcacaaattggtgatatcagctgcgatctgctggattgggatttggttgaacaaaacccgttcttctgtccggatgccagcaagctggagcctttggatgcgctaatgcgcgaattgaaaaaggccggtgattctatcggcgcgaaagtgacggtcgtggcggaacatgtgccggttggtttaggcgagccggtatttgatcgtctggatgccgatctggctcacgcgctgatgagcatcaacgcggtgaaaggcgtggaaataggcgacggttttgccgtagtcactaagcgtggcagcgaaaaccgcgacgaaatcactccggaaggttttcagagcaaccacgcaggcgggattctcggcggtatcagcagtggtcagccggtggttgcccacctggcgctgaaaccgacttccagcattatggtgccggggcagactatcaaccgtcagggagaagccgtggaaatggtgactcgcggtcgtcacgatccgtgcgtcggtatccgtgcggttcctattgccgaagccatgatggcgattgttttaatggaccacctgctgcgtcaacgcgcgcagtgtggcgatgttaactctgacgttccgcgctggtaactcaatgaagaaaatagggatgttgggggctgcggcctggttcgcgtcctcttcagtcatggctttgacgccgtggcaacaaatcgatcatccggttagcggtacctcgcaggccattggcggtttcgctaatggttgcgtcataggcgcgcagcctttgccgctggaatcggcaaattatcaggtaatgcgtcccgatcaacgccgttattttggtcatccggatttgctgaattttatccagcgattcagcgagcaggccaaacggcaacagttgggtttggtgttgatcggcgatatggctatgcctgccggtggacgctttagcagtggccatgccagccaccagtctggtctggatgtggatatctggctacagttgccaacccagcgctggacttcgcagcagttgctgaaacctcagccgatcgatttggtgtcctcggatggcaaacaggtagtaccgcgtttatggcagccacaggttgccagcatgataaaactggcagcgaaagacagcgaagtcacgcggattttcgtcaatccggcgattaagcagcagttatgtatcagtgccggaagtgatcgtgattggttgcataaagtccggccttggttcggccatcgggcgcatatgcacgtgcgtttgcgttgcccggcggacagtttggaatgcgaagatcaggattcaccgccagcgggtgatggctgtggtgccgagctgcaaagctggttccagcctcatcagccaagcgccaaaccgggtaaaactacgccgccaccattaccgccatcctgtcaggcgttgctggataaccacttcgcagggagatagtcattggattggttcactcttggccctgaggttctcggggtcttgtttttagtggcgctgctggcgggatttattgattccatcgccggcggcggcgggctattaaccattccggcgctattggcggtaggcgtgcctccgacccaagcgttggccacgaataaactccagtctgtgggcggttctttctcggccagcctgtattttattcgccgtggagcggttaatctcaaagagcaaaggctgactattgccctgactttggccggttcaatgctaggggcgattctggttcagcatatgcaggccgatatcttgcgacagattctccctctgctggtcatcggcatcggggtgtatttcctgctgacgccgagattgggagagttggatcgacaacgtcgactgtcagcgctgcctttcgcattaatcgccggtggtggcataggtttttacgatggtttctttggccccggcgccggctccttctatgcgttggcgtttgtcactttatgcggttttaatctggctaagtctactgctcacgccaaggtactgaacttcacctcgaatttaggtggtctaaccttctttattctcggtggaaaagtgttatggggcatcggcttggtgatgctggttgggcaggtgctgggcgcgcgtttgggcgcacatatggtgctaactcgtggtcagaaacttatccggccgatgatcgttgttgtgtctttggtgatgagttgcaagctactctatgataatcacggctcagaaattcaggcgtggctggcattgcagggcatcggctaatgctcgcttgttacgcggcttaatgggataatccctctttttccataagggcattattgctcactgtattgcctctgatgccaacttggcggaggcgtaatttgcggcttaccgggtatacacagcgtaatcatgtcagaaagtttatcgactcaaaaccatactcatcactatcaagaacttatcgatattttcaatcgctgtttcagcgaagaattcaacacgcggctggtgaaaggcgatgacgagcctatttatctgccggctgatgatcaggtggattacaatcgcattgtgttcgcccacggttactatgccagcggtatgcatgaaatttctcattggtgcattgccggcgaagaacggcgcaagcgggtagattttggttactggtactgcccggacgggcgcgatgcgctcacccaaagccagtttgaggcggtagaaatcaaaccgcaggcgctagaatggatgttttgcgtcgctgcgggtttccctttcaacgtgagttgcgacaatctggaaggtgactgcgagcccgatcgccttgcttttcaacgtaaagttcgtgaacaggtgctgcggaatttggaacagggaatatccccacgacctgcgggctttattcgggcgttgcaatcgttttacaatacgcccccgctggcggcggaacacttcccttatccggaagatttcgactgattgccagactgaccagaaagtttattgaggaagagtaatgatcgcagaatttgaatcgcgcattttggcgcagattgatgacatggtagagcacgccagcgatgatgacctgtttgcgggcggctacctgcgcggtcacctaacattagcagtggcagaatcggaagagcacggcgagcattctgccgagcagttacacgctcgcgttcagcacagtctggataaagccatcaaagctggcgaattatcgccgccggatcaggttttggtgttgggtctgtgggatcgcctattagcaaacgcgcagatttctcactagttttatcgctgccgtgacgctttaaggcatcatggcagctgcctttcattcagggcgcggtggattttgtaccggtctgcctttcagcagttttctaatccaaaaacgattcgggtttaatgcggacagcgttgaattattcagcggcaacggctcgccgaacatttgaccagccagaatctctgctatcagcggcgcactgcataatccgcgcgaccctaaagctccagccataaacaaatccggatataccggcgcggcttcgatcggatcgccgtttttgatctgctgttgtaacctctggtattgagtcagcgtggcctgatagtccggcactgcacccaccatcggtaaatggtcgcgaatggcgcagcgcacgccacagcgcgcctgattatctgaaacattcacctgctgtacccaatccacctgcggtaaacaacgcatcagacgatcgcgattttcttgttgctcagaggcactgaaaagggtggaggtttcaccgcgctgataactggctccgatacaatgctgctgattattcggattaaccggtgtcatataaccgtcgtagcagagtacgtttttcaatttgctgagggttggcgtggtgggaatatgggaaacctgaccacgtaccgccgtcagcggtaagaaacgagtttgttcccactggggtaagcgatggccggccgccagaatcaccgtgtgatgacgggtatctggctgattggcaaaagtcagctgccagcgattttctacccgcgtcagctcggtgacttcatgctgatagtggcagttcatgccttgttgttgtgccagagccatcagcgccgtggtcagttctgaagggcaaagccagccgccgtttggataatgaatgccgtcatgcccactgttcacacccgctcgctcagttagctgggcatggctcatggattcagcaaattctttcggccattgcgtgcctaaaatcttatcgattttgctacggcttttttcatcgtaagccagctggcttacgccgcaccactgatggtcgaaggccatgccttgttcgatcaatgcatcgtactggcggcgggcaaaggtaaaggcgctggtgtaaaaatcctctaacgcatcgccttttccgttcagtaacggataaatcgccccctgacgattgccggaagctccttgcgccggtttttcatcggcgcagtacaggctgacgttggctccgcgtcgcagcaaagaaagcgcggttagggcgctgacaatgccgccgccgataatggcgatatcctgaatgtcgctggcgaccgggcgggcataccaaggcgcaggatgtggattcatgtgattttccggcaaaaccccggtcagcatttcccttttttgcccaaaacctttgactttagcaacctcaaaaccggcctgcagcaagcctctacgcacgaagcctgcggcggtaaaggtcgcgaaagtcccccttgggcgagcgagtcgcgccatggcgctgaacagcaattcgttccacatatccgggtttttggaaggcgcgaagccgtccaggaaccaggcatcaacctgattatccatgctggcgtctaactgaggcagcagcgtattcacgtccccgaaccataaatccagcgtaatacgaccctgatccaacaaaatacggtgacaacccgccaggggcattggccactgggcgcgtagctgttcggaaaaagcagccaactcaggccagcggctgtgggcgacggcgagatctttcaggtttaacggatatttttcgaagcttatatagtgcaggtgctgaagcgatgcatcaggttgttgctgacgaaactgcgcgaaactttgccacagtgttaaaaagtttaggccagtgccaaaaccggtttccgcgaccacgcagcgagtggacgaatgctcgataaaacgctgtggaaaaccgtttcccttgagaaaaacaaaacgggtttcttccagcccatcctgatttgaaaagtagacgtcatcaaactgttccgaaacaggtgtaccctgatcgttccagctgagtgtggcggtttggatgggggtgttattcacgtaagaagactcgtatctcaaggggtagagggattttaacgaggtgttaccttgggtgcaaatcggaagataatctggtgatattacgctgatcggacttgttcggcgtacaactgtacgctaaagtgcattgcaaaatcccgaaagctaaaagtggaagaggtattaaatgaagcgtgcagtgattactggcctgggtatcgtctccagcattggtaacaatcagcaggaggtcctggcatctctgcaggaaggtcgttctggtattactttcgctcaggaatttaaagacgcaggtatgcgcagccatgtttggggcgatgtaaaactccagtctgagccgaaagatctgatcgatcgcaaggtgctgcgttttatgagcgacgcctcgatctacgcttatttggctatgcaggaagcaatttcagactctggtctgaccgaagagcaggtttctaacttccgcagcggcttggtagtcggttctggcggtggttcgccacgtaaccaggttgctggttccgatgccatgcgtactccgcgcggcctgaaaggcgttggcccgtacatggtgaccaaagctatggcatccggcgtttccgcatgtctggctacgccgttcaaaatcaagggcgttaactactctatcagctccgcctgtgccacctctgctcactgtatcggtcatgcggttgaactgattcagctcggcaagcaggacgtagtttttgctggcggcggcgaagagctgtgctgggaaatggcctgtgagtttgatgcgatgggcgccctgtccaccaagtacaacgaaacgccagaaaaagcgtctcgtacctacgataaagaccgtgacggtttcgttatcgcaggcggcggcggtatggtcgtagttgaagaactcgagcatgcattagcccgtggcgcacatatctatgctgaaatcgtcggttacggcgcaacttcagatggcgcagacatggttgctccatcaggcgaaggcgcggtgcgttgtatgcaaatggcgatgcagggcgttgatactcctattgattatatgaacgtgcacggtacttctacgccagttggcgatgtgaaagaactgggcgcaattcgtgaagtcttcggtgacaatacaccggcaatctcttctaccaaagcgatgaccggtcactctctgggggctgcaggcgttcatgaggctatctttagcttgctgatggttgagcacggttttattgcgccgagcatcaacatcgaaaatctggacgagaaagccgaagggatgaacatcatcactgagccaaccaaacgtgaactgacgacggttatgtccaacagcttcggttttggtggtactaacgccactctggtgatgcgtaaataccagaaataagccgtcccgagacttattacgccatcatttttacaatgattaaaattgaatcccgaactgattgcagttcgggattttttttatctctttatctctttatctctttggttattttcttaatccatatctatagttattgaggctttagatcgggaatgtcttttcattctaattatttgcattacggataatggaataagccgccgctgatgttacaacgtgccatcaagaccttgtacgttgctatcgggcttttttagcgataagcgccgtattcacattcctgccgtaggcttaactgcaaggatgtatccggtgaaaacccccgctgatttgccgctaatgaaactcgatgctcaacaagggaattaagatctaatcagtatttcttgggtcaggctctggttaaaattgcggcgcttgaagggattcattttatttcgttatcacaacgcgattcgcggtttttcgtcttaaagcgagaagcttaggttttatagagctcaaacgaacgggtgcattacaatgaaatatctgtttttattgatatttatactttgcgtgctttacattcattaccgcggacgagctcgctatcctttttggcgacagctttctgatcactccacctttgtggcaccgctcaatgtgtttatgtaccttttttctaaagtaccgaacacgccatatttaaaacccgaaacctttcccgaattacagcagttacaggccaactggcaaaagattcgcgaagaaggtgaatccttgatggcgatacagcagattaaggcttcggataaatataatgatgccggttttaactcgttctttaaaaccggctggaaacgtttttatttaaaatggtatgaggataatcatccttcggcgatgagtctgtgtccgtttacgacggaactactgcgtggattaccttcggtgaaagcagccatgtttgcggaattacctgatggcagccgtttgcctcgccaccgcgatccctatgctggttctttgcgctatcaccttggtttgattacgcccaacgacgaccgctgttttattgaagtggacggcgaaccctatagctggcgggatggggaaggggtattgttcgacgaaacctatctgcattttgccgagaataaaagcggcaagaaccggctgattttattttgtgatatagagcggccgatgcgttatcgctgggcgcagcgggttaatcattggtttggtcggaatttaatgagtgcggcaaccgcgccaaacagtgatgaagatcgtactggtggggtgaatcggttatttaaatatatttacgcgatacgtaaagtgggtaaacgattaaaagcctggaatcgacgagtttactatctgattaaatgggtattatttggtggtatcgcaggattgattttcttctctttataactgattttcgtgatgatagaccaataaagtaaaactaagctggggcaatcagttgccccatcgctattatcttttgcttttagggatcttcgcggccagttattagcttaacgcatatttagcggcggtttgagcatgaatggcggtggtatcaaataccggtactgaggcatcttcagcgtttaccagcagagtgatctcagtacagcccaaaataatacccttggcgccttgttgttccagtttggtaataatccggcggtattctgctctggatgtttcgttgatttcacctaaacaaagttcctgataaataatccgattgacgatttcccgatccgcatcgtcaggcaccacgacctcgatattatgcctttcggttaagcgcccacggtaaaaatcctgttccatcgtatagcgggtacccagtaacccaatttttttcaacccctgttgcttaatctgcgccgcagtagcgtcggcaatgtgcaataacggcaagccgctggccgcctcaatctcatctgccactttgtgcatggtattggtacataccacgatagtttcggcaccggctttttttaaagccactgcagcattagccagcaggcgagccgctgcctgccaatcgccagatgattgcatttgctcaacttcatgaaaatctacgctataaagcacgatttttgccgaatgaagaccacctagatgttgcttaacatattgattaatcatccggtaataaggaatagtggattcccaactcattcccccgatcagaccaagagttttcatctattttcctgccagtagtaaaagtgaagccgttgccagccagatcgaatttatcttttgataaagtcgggcgtaataaaaccaggtggacagatagcgcggagcaattcgtaaaactgtgattaggctccacctttgccgcaagtgccgaactatgatggtcgttgtaatatttatatataaataaatagcattatcaaaactatataaattaaacctcggagcctgggatgataaaagtgaaaaccgccgcatcgttaactttgcttgccctgttattacctgctgcagaagtggccttagcgcaggatcggggcaataatgttcggtctgaacaaaacggttatcagttggagcaggtattggtaatgagccgccacggtattcgtgcgccgttggttaactatggtgatattttgtctagcgcgacgccatttcaatggccgaaatgggaaacgcccggaggattgttaacgccaaaaggcgcggaagttgaggctattttcggcggttacttccgcgagtggctggtgcaaaataaattactgacagcgcagggttgcccaggagacggcaaggtatttacctacgccaatagtttgccacgtactatagatacggctcagcatttcctatttggggcttttcccggctgtaatgtaccggtgcatcaccaaaaagacattggcaaaatggatccggtatttaatcccataattaccttggatgtgacgcccgaatttaaagctcaggcattagcatcaattaatcagcacgctggccccggtggtatagcaggactcaatcagcgtttgcagccaaattatcaaatactgtcgcggatattggattttaaaaactcgccgtcctgtttgcaggataaaaaatgtgattggagcgagcaacccaacgtaatttcactggtgcaaaacaaggaaccgggaatgaccgggccgttgaagttgggtaccggcgcgtctgacgcctttatgctgcaatactatgagggtttcccgctaaaagacgtggcttgggggcgaattgcttcgccggaagagtggaagcaattgcaggaaataaaaaatcgatatcatgaaaccttatttggttcaccggcaatagcggataacgccgccgagaaactggttaattttattcatgctgctttagatccggtgggagagaaaacgccaaatgagcaactggcgcagcaagctaaattagcggtgctagtagggcatgattctaatattgcctctttgctagccgccataaaaaccaaagactatcaattacctaatcagtatgagaaaacgccgatcagcggaaaagtagtatttgaacgctggaaagacacaaaaaataataaagatctgatgaagattgaatatatctatctttcaaccgaacagattcgcaataaaacgccgctgagtttgcaagcgccgcctgagcgcgtcacgttggaaattgaaggctgcccaattgatgcccaaggtttttgctctatggacgatttccgacaggcaatgaaggaaaatactcatatctaaacgactattcgcggcaggagagtaactcctgccgtattttactgctccggctctctcggttaagctgaggctaatctcctctcaatggtcaacgctttctatgactggatcaatttctctgcgtaccggcctgaatactttatttaaaccttttttacgcgatcgtctgctgcatattttactgctggtggggattggactgagtctctggatgccagagaaaattcacgctttccctgattatatcgattggaccaccatcattaccttgctgggacttatgctgttgaccaagggcgtagaggtgagcggttattttgattttattggccgtaagataattaataaactccacactgaacggcatatggcgctgtttttggtattatcagcggctttgctttcctcatttctcaccaatgatgtcgctctgtttatcgtggtgccgctgattctgaccttaaaaaaaatgtcatcgctgccggttagtcggttaattattttttcagccattgcggtcaatgctggttcgttgctgacgccgattggaaatccacaaaatatcctgctgtggagtcaatctgagctgtcatttttaacctttacgcagcaaatgctgcctttagctgcggcaatgttaatgacgttatttgggctgacttggctgtttttccccgctcgtcaaatcagtaagcgtcgtgatactccagaatatccgtatcaatcgggtttattactgagttgtctggtgctgtatattttgtttgtggttagcgtcgatttaggctggggtctttatgggttaatggcggtatcaatcgggctattactgctggccagacgggtattgttttatatcgactggagcctgatttttgtgtttatggccatgtttatcgatattcgactattgacggaattaccggcgctgcaaagcctgtttggtggtatcagtacattgccaccatcgggtatttatctgcttggaatcggttcttcgcagatcataagcaatgtgcccgcgacgatcctgttattaaattacgtgccttccagtgctttgctggcttatgcggtcaatattggcggcttcggattagcaattggttccatggcaaatcttattgccttaagaatggccaaagagcctagtatctggctgaagtttcacgcattttcactgccgttattactatggggagcgctggtgggctgggtgttgctgtagctgactcaggggtaatcctgagccaaccaatcatcagataaacagtataaataatacgacgaaggcgataatcaaagcgataaaggccaacgagggctttttcagcagtggttgcaacggagcaggcagtgcggcgataaacggattgtaaatcggctgaatcgggccttgttcgtcgctgcgctgtatcgttattgcgcgatccaagcggttggaaaatagcacgttaatgacatcgttaagctgagcctgagtcaacggcgtggttgggctggcctgaaaacgatgctgagcataatcggttaacagtttctgctcagtgctatctaccggctgtttcaatgcggcttgcaggcttactagcgttggcgcggcctgctgactgagggcgactttggtctgtaagaactggctcataagctgaaaatgacgagcgggaagcggatcggtatgcttaataccaatcatctcaaatagcccttgccagattttagctggctgttcaccggttgcagcgctgagtttggtgaccagcgattgcaggctttggtgctcggcgggtaatagcgggcgatcggttacggcggcaagctgcggctgcgggatggtcagcgtaccggattgcagtagtacgaagacttgctgtaattgctgatggcttagctggctgagcaccgtatggccaaagttctgccgaataaagtcgctgactgcctgacggttattcccttgaggtagtagttcggtcaactgttggcgtaactggtgattagcgtgattttcctgcgcctgacccaaacgggtttgcagcaactgttccgccggctgaaaatgtcgtgccagcagctctgcggtattagttaatgataaatcgtggcgtagggtagcccatatttccgccgactttaccggcgtgagcgccataattcgtacgatcagcttttccagcgtagtacgctgagccggagttaacgcctgatcgtcaccgctgttcaacgggctggttttgttcggcacagcggttgtggtgcgatcgctggctataggggcgccggagccgtttaaaggttgcatttcacccgtccttcgctaggaataaaatcatggttacccggcgattggcgcaggctggggctataatacctgtaaatttgtccaatcaatacagtccggcttgggttttattagatgaatgtttatgttgtgggcattgataatcttaattatgtcgctaagatgagtacacaacgaaaaatagggcttaaatggttcatcaacaacgcattgcaaaatggttcctctgtctggcttgtctggtcgtactagtatgtatgactcagcgcatggctagcatgcacgcgttagaacaaaatttcggcctgacttccctgagccagacggttgacgacgagcaaacgtcacaggcaccttgtgagctaagtgctaaatctctcttggccgcgccaacggtgctgtttgagctgacgtattttgctttgggattattgttactgttattggttccaatctctccgtgcgtgatgcggtttccgccgcggcgcgccatttcacccagtcgattaagggtgcacctccgattttgcattttccgggaatagcgactccgccagttgatttggtgtgattaatctatttttggagaaaagtaatgcgcaatattttcaagacagccttgttctgtctttcgctgctatggctgcccagtctgtgggctgcggatagcggttggctcatcagtccgctcaatgaccatgccaaggtacggctgcgcgctgaacctaccgccgaaggcgatacgcgcctattgctgtcggtcgcgttggaaaagggttggaaaacctattggcgttcgccgggcgaaggcggtattgcaccgtcgatacgttgggatcatgcgccagcccaagtgacatggcactggccaacgccgcaacgctttgatgtatcaggaatctctacgcaaggctatcaacagcatgtctccttgccgatagtgatttcgggtacgtcggattcagtgctatcgggaacgctgaccctatcaacctgtagcaacgtctgtattttgacggattatcctttccgtttggatctgagtaaaaccggctccaatccgcgttttgactacgatttcgcgcaagccttagggcaggtgccgataaccagcggtctggtcgatgagatttccgccggttatggtaacggtgaagtgcagattttagctcagcgccgtgcgggttggcagcagccagaactgttctttgacactctcgatgatgctgatttgggcaaaccggtgattgccatttctggtgagcaactggtggttcgggttccggctagcgatggctggggtgacagcgcgccggatctgcgtgggaaaaatctaacgctggtgatcagcgacggcggcgtggcgcaggaagccaccgttaaactggggaatagcgtttcgctgcctaataccgccaccgcctattggcagtggattttgatggcgttggccggcgggttgattctgaacctgatgccttgcgtactcccggtactggcgatgaagttaggctcggttttgcaggttgaaaaccaaagccgcggtagcgtgcgattgcagtttatttcctcgtcgatgggaattcttttctcgttctggctattggcgttgctgatgaccgcgctacgtcttggcaaccacgccctcggctgggggattcagttccaaagcccgtggtttatcggctttatggtgctggtgacggcgttattcagcgctaatctgtttggtctgtttgaagtgcgactttcttcctcggcgacgacccgcattgcgactcagggtggcaacggcttgggtgggcatttctggcaaggcgcattggcgacactgctggcgacgccttgctccgcgcctttcctcggcacggccgtggcttttgcgctcgccgctccgcttccggcactttggggcatttttactgcgctcggggttggaatgagtctgccttggttgttgatcgccgcctggccgaagttggcgttgtgcctgccgcgccctggccgctggatgaaccatctgcgggggatattgggactgttaatgctggcgtcctgtttgtggttaatcagcctgttgagcagccatatcggcatcctgtggaccgggattattgccggtattttcctgttggctttgttgctggctattgggcgtcattatggtgtgcgtattgccgctattgtcagtctaatcagcctgttagtgattggcgtggcgttgctggtcggcgcgttaaccgcggatctgtggcgtaaaccgctgcacgatcgtgtgccatggcaaccgctcagtgaaactgcgattcagcaggcgctgaaggaaaacaagcgggttttcgtcgacgtgaccgctgactggtgtgtgacctgcaaagtcaataaaatcaacgtattgatgcgcgatgacgtgcaaaaggctctgatggaggatgacgtagtcgctctacgcggtgactggacgcgcccttcgccagagatgacggcgttcttacgtaaacgcggcagcgttgccgtgcctttcaatcaaatctacggcccaaatagcccgcagggcgtggtgctgtcccctctgctaagccgtgaatctctgctagacgttttagccaccgctaaaggaaataaatcatgaaaatcgtcactctgttggtactttccctgataactgcgccggtattcgcggcaccttttactccagagcaagagctgcgtattaaagaattgatcggagaaactctgatttctaatccggaaattctggaaaaatcggttaatgcgtggcagcaaaaggctaacgatgagcaaggtaagcaactgagcgccttgattaaagccaatgaaaaagatctgtatcaggacccagctagcccgcgtttgggagcggaaaatccgaagttaacgctagtttcctttaccgattacaactgtccgtattgcaaaaccttcgatccactgttggaaaagatcgttaaaacctatcctcaggtggctttagtgatcaagccgttgccatttaaaggcgaaagttcagtacgcagcgcccaggtggctctgacgctgtggcaacagcatccggagcaatttttaccgtttcatcagcgtttgatggcgaaaaaaggtttccatgatgcagcgagcatcgctgctgccgagaaaaaaaccggcgtagttgcggtggaacccacggagcagagcctgaacgtattgcggactaacctgcgtctggccgatcaactgggtattcaagggactcccgccacgttaatcggcgaccaaatggtgccaggggcaatatcctatgatcaactagaagaaattgttaaagcgcaactggcgcaggcggaaaaatgagccgactgaaacgttggagccgtgagctgctaatcctgctggcggtggtgctggcgttgaccgttgctatggattggctgcgcagcccgcaggcgccgccgagctgggcggaggaatcactggtcactctggatgggcagccggtgtctctgaaagcgctgagtgaggaaaaaccgctgttggtatatttctgggccagctggtgtggcgtatgtaaatttactacgcctagcgtgaacaccctggctgctcaaggggaaaatgtgatgaccgtagcgctgcgctccggagataaccagcaggtagaaaagtggctggcaaagaaaggtcagcgtttgccggtggtaaacgatccttcggggcaactctctgcccaatggcagataggggttactccgaccatcgcaattttatatcgcggagaaatggtcagcagcaccagcggctggaccagtttgtggggtatgaaactgcggttgtggtgggccagtttctgattaaattaagatagtaaaaatccgatagtacattggactgcatcttattcagttggatatccactgagtaaggtgcagttttttatccaatactggcgtagcctgaatagactttggtaaccgccattaattaacagccccccattcagccaattttgtattccatgcggtatattctggtgaggggagtttgaagaaaccaatggaatatctttcaggcgtagcctgaagcaatagggtacacaccagatcctgaagccaggtcgtattttccacattttcaaatttctgtatatctttaagcttatttattgattcatatacataaatcaatgaatctcttatgttttgatatttctcattctgagcagcgtgtttgttagggaaaataaaacttgcgactttccaccaaaaacttttaggggaattatgtatttttaagttgtttactgcatctctgatgattggttgcaatcctgttttactgctcagtaatagtggtggctggttttttaattctagcaatgctactgaatcagcatcgaatttgctgaagtgagcgttagtatactcgtcaatggttttttttgtttttttctagtgtttggtaatcaccttcaagcatatctgctttagaaagggctaatgtatggttgattgtgttggtgttttttatatctgattggtaattgccattaagccttatgtttaataaggttttaaaaattttactgatttgagaacatgttaagtataatttataactattctcaatatcacttttcaatttttcaatgtcagcttgagttggcacaaattctttaataattaactgcggttcttcaatggttgatattggtaacggatgcttacgtacttctattttaatatttccacccagaagtctattaaacgctttagctattctggtaattttgaatattctgttcagtgcgccattttggtttaagatatcatctaatttattagagagagttccactaccgtgaccttttaatatttgttgaattagttcggctattttttccggttctgtcggtaaatgccttactctgactatgtttttccctgaaatctcaggtagctctatatatttatgaatatctttattttcattattaatttcgcttaacagataaccgatatgtaattcttgatttttaggggtgtcaatatactcttgcaaccagtttctaatgtcgtttcctatagcactgatggttgcatcatcaagtttttcgtttatttttattcttgttggcaacgcgtcatctattgatgaagttgatggttgttcaattctgtgttttttggccaatgcatggtagttatgaattgacttactcatattcccaagcttgtttttctttgatgtattaaatacattgattgattttataaatatactgtctttgttcttgttttgattcttttgggttttacttaacaaggaaggtgtagatgtttgattgattttttggagctttgaaccaaatccactacgcacttcatcggagagaggctttaataccagttgtgtactattcgttaagtttgtcacttttggcatagtaatcatctcatatttattagtggagatgatattattgctaaacattattaacaacgctttcaagaagtgattattttattagataattaactagtatattagatgtctatgttcagggttgagagtgaaaataatagtattgcagagaatttcatttgctgacatttcgctaatgcggaacagttttcatttattggtattgcgaatgaaaatatgccgtcccagccagaacaaaaatcgctccaggctggaaggcatgcaccggtttttcaatcagctagcttttattcgtttgctgattggtggttgattcaaccttgatttcaataattggcgctggggttttacgtagtggaatccgcagacgttgcgccagaatgacaccggccagtgtaattcccccgccaatcaggtgatagctgtgtaattgttcgtgcaggaagcttacggcaataatggcggtgaataccggagtcagattcataaaaatcgatgcggtattggcacctaaacgcatcacgccgtgaatccacaggtaaggcgcgataattgacgcagggataccagcaaatagcaccaacggaatattttgcgcggtaagctgcacatcgcttgccagcaggaaattagggattaacaacagcacaccaaacacaatctgcatgtacagagattgccagttaggtagctgaatattccagcgtttggtgagtacgccgtacagagcgtaagaggtagaggccgccagcatcatcgcctcaccttgaccaataccgtgctgtagcaactgcgccggatcgccagcgctcaccagccacaccagtccacccagcgataaaatactgcctaaagcgatgcctactgtgggagcaacccgcagtacgacaatactgattaatacggttaacaacggaataagcgagctgagaatccccataaacagggcgctaacgctgtgtgccgcataataagccaggctttgatacaacaccattcccagtaggcccagaatgaacagtttccaccagtaaaccttaatcgccggccagttgcgaatcacgcccatgagtaaaaaaggggtaagggtgataaacgccagtaaccagcgatagaaagagattgccgctgggtcgatagccgtggcagagattttactgaccacggcattgaccgaccaaatgatcaccgcgaacagagggaaaagcacattcatgataactattctcatttaaactaacttgtacgctagtctactcctgtctgatttattatatatactgataatcggacaagattcagcgcaattaagacatttgctcggtagcgaacgccttagccacaacaatctgattaaccatggtgtctcaatgatggcttcttccttgctacccaaggcgctggctgcgccacctaaaaccctgttgctccgttgtgaggaactcaatgctgatacggagtttttgccgcattctcatcaatatgggcagttaatttgcgtcaaatctggcgtcgttgccatgagcgtcggtgggcagcgcttccttgctccgccagagttcagcctatggatacctagcggaatggagcactctagctataatcggcggccaacccaatatcgggccatagatattgcgttggatttatgcaaagagctgccggattctccctgtctgattaactttagcccgatcattaatgtcattctggaagattgctttacgcgcgggatgtctgcgccgcagacgccgcaggatcaccgtttggtgcaggtgttgatcgaccaactgaaaatatcaccgatacaacgcacttatttgcccacctcgcaggataaactgctggcacccattctatccgcgttggagcgctgtccgtcagacaatacgtcgttatctcaatgggctaaacgggtttacagcaccgagcgcacgttatctcgccgctgccagagggaattaggcatgccttttagcgagtggcggcaaagactgaggtttttacatgctatttctctattagaacaaggaaaaaccgtaaatagcgtggcgttggaagtgggatacagctcggcgtcggcctttattgttatgttccagcaaatttcaggcaccacgccggagcgttatcggcgcggacaatagattttccgaagaaagcctcagttataacgttgggttcgagttcattcagtggcaaaatagcgcccatctttttcatcggtatggcagcgcgctgtcggagagcaaagtgaaaattctggttgatgaaaatatgccttacgccaaggacctgttccagcgtttaggtgaagtgcaggcggtgccggggcgaccaattccccttgaggctttgacccacgcggacgcgctgatggtgcgctctgtcactaaagtcaacgcggaattgttagaaggcactggcatcggttttgttggcaccgctaccgcgggcacggatcatgtggatgaggtctggctacgtcagcaggggatcggtttttcggcggctcccggctgtaatgctctcgcggtggtggaatacgttttttctgccctgatgatgatggcggagcgcgatggattccatctgcgtgataaaaccgtcggaattattggtgtaggtaatgtgggggcgcggcttaatgcgcgcttgcaagccttaggcgttcggacgttattgtgcgatcccccgcgtgcggatcggggggattcagaagaattctggccgttggaaaaactggtgcgggaagcggatgtgctgactttccatacgccgttaaacaaaagtggcccttatcaaagcctgcacatggcggaggccgagctgctggccgcactgccggataaccgtattctgatcaatgcctgtcgtggtgctgtcgtcgataacgcggcgctgctgaaggcgttggaaaaaggtaaaaaactcagcgtggtattggacgtgtgggaacctgagccagagctatcgctgccactattggcgcgggtggatattggcacgccacatatcgccggttatacgctggaaggcaaggcgcgcggcaccacgcaggtatttgaagctttcagccggcatattggtcagccgcaatcggtggaattgtcctcattgttacctcagccggaatttagccatattcggttaaatggcgggttggatgaaggcaaattaaagcgattaatgcacttggtgtatgatgtgcgccgcgatgatgcgccgttgcgacaggttgccggtattaaaggcgaatttgatcggctgcgtaagcattatcaagaacgtcgtgaatggtcatcgttgtgcgtacagtgcgacgatgaggccagcgcagaattactgcaaaaactgggcttcacgactcagcttttgtaggcatttcagtttgtcagcgagttaaacgctgcaaatgacctgaatttagattatcaaggcggtattgaccgcctctttgtatttgaacgaattattgtggagaaaaccaacatgtctgacggctggaatattgctctgttaggagcgacgggcgcagtaggtgaagctttactggagctgttacaagagcgccagttcccggttggtgaattgtatcctctggccagcgagcgtagcgccggagccacggtgcgtttcaatggcaaaagcctgctggtggaaaatgtggcagagtttgactggtcgcaggcccagttggccttctttgtggcaggcagcgaagcctctgcgctgtatgcggaggacgccggtaactccggttgtctggtgattgatagcagcggcctgttcgccatggaacccgacgttccgctggtggtgccaagcgtcaatccgcaggttctggccgattatcgtaaccgtaatatcgtagcggtagccgatagcctcactagccagttactgacggcaatcaaaccgctgaccgagcaggccggtttgtcccgtttacacgttaccagcctgatttcggcttctgctcacggcaaagccgccgtggatgatttagccggtcaaagtgccaaattgctgaacggtattccggctgaagctgctatcttcccgaaacagctggcgtttaacgtcttgccactgctggcggacgaagagggcagcgtgcgtgaagagcgccgcttggtcgatcaggtgcgcaaagtgctgcaagacgaaggcctgccgatttccgtcagttgcattcagtcgccggttttctacggtcatgcacaagtggttcatttggaagccttgcgtcctatcgcttctgatgaagctcgcagtgaactggaaagctgtgaagatattcagttgacggaagaagatgatttcccaacgcaggttagcgatgcttctggcagcaactatctgagtattggttgtgtgcgtaacgattacggtattcctgagattctgcaattctggtccgttgccgacaatattcgcttcggcggcgcgctgatggcaatcgaaaccgcagagcgcctgttgcaggagcaactgtactaatgtctgagcttgaattatccccgcagccggagcaggcggcgggtctgaagatcgcgctgggcattgaatacaacggcagccgctactttggctggcagcgtcagcaagaagtggccagcgtgcaggcctgtctggaagcggcgttgacccgagtggccaacgagcctatcaccgtgcagtgcgccggtcgtactgacgcaggcgtgcatgcaaccggtcaggtagtacattttgtcacctcagcggtgcgaaaagatgcggcctggaccatgggcgtcaatacccatttgccaccggatatcgcggtgcgctgggtaaaaaccgtcagtgaagatttccacgcgcgtttcagcgctaccgcgcgtcgctatcgttatgtgatttataaccatcgctatcgtccggctattttggcgcagggcgtgacccactgctatatgccgttggatgcggaaaaaatggcgcgcgcggcgcaggcgctgttgggggaaaacgattttacctcgttcagagcggtgcaatgccagtcccgcacgccgtggcgaaatgtaaaacatgtaaaagtttcccgacagggcgcttatatcgtggtagatatcaaggccaacgcatttgttcatcatatggtgcgaaatatcgttggcagcttgattgaggttggatgcggtaatcaagacgaaaactggattgcggagctattggcgctgaaagatcgaaccaaagcggcggcaacggcgaaggccgaagggttatatttagtggcggtagattatccggaacattttgatttacctcaggtacctatggggccgttgtttttggctgacgatgagttcttagctgtgaaaagcttttagctaagcatggtttttagctgagaataacttttggctaagaaagactttgggttgagaatagtgtccgggcgactagtcaatatatttagagcaactcatctacctgattcaggtgggcggcggtgcgctcgctaattgagagtgtttatggaattcatacggttcgttattgattttattctgcatattgatgtccatctggcagagttggtagcgcagtacggtatttgggtttatggcatcctgtttctgattttattctgtgaaaccggtctggttgtgacgccgttcctaccaggggattccctgctgttcgtcgctggcacgctggctgcattgccaaccaacgatctcaatgtacataccatggtggttttaatggtgatcgccgcaattatcggtgatgcggttaactacactattggccgcgtatttggtgaaaagctgttcagcaatcctgattcgaaaatattccgacgcgcctatctggataaaactcaccagttttatgagaaacatggcgggaaagcgattattttggctcgatttgttcctatcgtgcgcacatttgcgccgtttgtcgccggtatgggtaaaatgtcctatcgtcactttgcggcgtataacgtgataggggcgttggtatgggtgttattattcacctatgctggttatattttcggaaacgtgccttttgtgcagaacaatctgaaattactgatagtagtgattattgttgtttccattttgccgggtgttattgaggtttggcggcatcgccgcgcggctacccgccagaaaaataagtaaaaatgttgcagtaaccaagggttcgaccagttttttatccacagtgtcgggccaatatggtttaatgtgtaacattaatggtctgttcctgcggacactccgagaacctgtgcctaatcacgcttcgttggcgtggtgtttgggcactttttgttggcagtgttttcagggagatggttacagcatgaacagcggactggcatcggccaggttcaaacagaaaggtcatcgatgagctggattgaacgaattcttaacaaaagcaacatcacgcaaacccgtaaagcgagtatacctgaaggggtgtggacaaaatgcgatagctgtgggcaggttctgtaccgcgccgagctagagcgtaatctggaagtttgtcctaagtgtgatcaccacatgcgtatgtcggcgcgtcagcgtttacatacattgttggatgcaggcagtgaagttgaactgggcagcgaactggagccgaaggatatcctgaagtttaaggattccaaaaagtataaagatcgcctttctgcagcgcagaaagaaaccggtgaaaaagacgcattggtcgcaatgaaaggcactttgtacggtatgcctatcgttgcggcttcctttgaattcgcttttatgggcggttcaatggcttccgtagtgggcgcacgttttgtccgcgcggtagaacaggcattggaagacaattgccctttggtctgcttctcctccagcggcggcgcccgtatgcaggaagcgttgatgtcattgatgcagatggcaaaaaccagtgcggcgttggcaaaaatgcaagagcgcggcttgccttacatttctgttctgaccgatccgaccatggggggcgtttccgccagcctggcgatgctgggtgatattaatatagccgagccaaaagcgctgatcggctttgccggcccgcgtgttatcgagcagaccgtgcgcgagaagctgccaccgggcttccaacgcagtgaattcctgatcgagaaaggcgcgattgatatgatcgttcgccgtccggtcatgcgtgaaaccttggccagcattctgtctaaactgaccaaccagccgcagcctatcgtggctgaagccaaaactgtcgtagtcgaaaacgacgatgcagtagaaggctaattcggcctgcgggcatcacttttaccgagtgatgcccgattatcgctgacagaaattgcgagctaaaggttgattaaccacagggtaatttaaccggcgtctgtcaggcgttctgcctggcgaacaccatggaatgaatccaaggccagtgacgggactcatgaataatcatcaaatcccccaagccacgtcgcctttagccgcgtggctttactatcttgagcgtttacattttcaggccattgatatgggtctggagcgtatcaaacaggttgccgagcggctcgaactgctaaagccggcgcctatcgttttcaccatcgccggtaccaacggtaaaggcaccacttgctgtacgctggaagcgattttactcgccgccggtttacgagtgggcgtctacagttccccacatttgctggaatacaccgagcgggttcgcattcaaggccatgagttgcctgaatctgaacatagccaatcttttgcctatatcgaagccggtcgcggcgacatttccctgacttattttgaattcagcacgctatccgctttgcatctgtttaaacaggcaaaactggacgtggtgattctggaagttgggttgggtgggcgtctggatgcaaccaatattgtggattcagacgtcgcgggcgtaaccagtattgcgttggatcataccgactggctgggtgcagatcgcgaaagtatcggtcgcgagaaagccggcgtattccgcgccggtaagcctgcggtggtcggcgagccggatatgccaaactccatcgccgctgtagctaaagagttgggcgcgcatttgtatcgccgcgatgaagcctggaaatttagccaacaggattctagctggaactggcagtgcggagcctctgaactaaaggatctgccgttgccaaacgtccccttggctaatgcagccacggcgttggcggtattgcactattcgccgctccagatcgctgaggaagctatccgtcaggggctgatcgcggcgcagttaccggggcgtttccaaattgtcagtgaacgacctatgctgattctggacgttgctcacaatcctcatgccgccggttatctcgccgatcgcctgtctcaattaccggcgacccagggtaaagttcgcgcggtagtggggatgctggcggataaagatatcccaggtacgctggcgtgtttaagcccgcaggttgatgaatggtactgtgcgccgctggaagggccgcggggagccagcgtggcagctttggcgcagcatcttgaagcatcgcggcaatttaccgatgtggcaacggcgtggcgtcaggccatgcaggatgcgacagcggaagacgtggttatcgtgtgtgggtctttccttaccgtggctcatgtgatggaagcattgaaaacggggagtgtgagtggccagtaaattccagaaccgtttagtgggtaccgtcattttggtggcgctgggcgtcattttattacccggtttgctggatggtaagaaaaagcattatgaggatgagtttgccgctattccattagtacctaagcccggcgatgcggaagaaatcgacgtggtgccgccggtgaaccagcctttaccgacgcagccgccagaaggtgcagcggaagccctcggagccaataaaggtgaagaatcagcctctcaggcagctaacgatgcaggtagcgttgcaactccgccactggtcgtcagtaagcctattgaaactaagcctgtaccgccaaaaccggtagaggttaagccgatagaagttaaaccgatagaagttaaaccaatagagaagaaacaggccgcgcctaaaccggttgaggtgaaacctaagcctgaagttaagccgatagaaaccaaacctgaggcgaaagtggaagaaaaagcgccgacaggacaggcctatgtggttcaactgggggcgctgaaaaacgcggccaaagtgaatgagatcgtagcgaagttacgcttatcgggtcatcgcgcctataccgtgccggctacgccggttcagggtgaaattacccgcgtattcgttggcccggatgcttcaaagcagaatttgcaatcggcgttgcctgaactgaatgccctaagcggcctgaacgggcaggttaaggcatacaataccggccgctaaagtgatttacccttgtcccgccgcggtagaacgacggctggcaaggggttatagctaagtttgtgcggcgattgttgtttttaaaatcgccgcactttatttatcggagcgcaggaattcccctacgcaaacgttttctttttctgttagaattcgccgcgaacaggatgtaggggcgatttcatcattggaatagtcatggtttggattgattacgtcattataggaattatcgggttttctgctttagtcagcttgatccggggttttgtccgtgaagcattgtcacttgtgacatggggatgtgcgttttttgttgccagccatttttatgcttatcttgccatttacttcacgcgttttgaagacgaactcgtacgcaatggcatcgcgatcggcatcttgttcattgcgacattgatcgtcggagcaattgttaactacgtgattggctcgctggttgagcgtaccgggttatcgggaacggacagagtgttggggatctgtttcggcgcactgcgaggtgtgttgatcgttgccgccatgctgttctttctggatacctttaccggcttctcacaaagtgaagactggaaacagtcgcagttgattccgcagttcagttatatcatcaggtggttctttgactacctgcagagcacgtcgagtttcttgccgaatcaattaccgattcggagcggcttatgaggaaagacacatgtgcggtattgtcggtatcgccggttttacaccggtaaaccagtcgatttatgatgcgttaacggtgcttcagcaccgaggtcaggatgccgcaggcatcgtcaccattgatgccaataatggattccgtctgcgtaaagcgaacggtttggtgaaggatgtttttgaaacccggcatatgctccggctgcagggaaatatgggcattggtcacgtccgctacccaaccgccggcagctccagcgcctctgaggcccagcctttctacgttaactcaccgtttggtattacgctggctcacaacggcaatctgactaacgctcaccagctgagaaagcagttgttcgaagtctcccgccgtcatgtgaataccacttctgattcagaaattctgctaaatatcttcgccagcgaactggatcgcttccaacattatccgttggaaacagacaatatttttgctgccgttgccgccatgcatcagcttattcgcggtgcttatgcctgcgtagcgatgatcataggccacggtatggttgctttccgcgatccgaacggtattcgccctttggtgattggtaaacgcaccctggttgatggccgtaatgagtatatggttgcctctgaaagtgtggcgctggatacgctaggctttgaatttctgcgtgatgtggctccgggcgaagcggtgtatatcaccgaaaaaggccagttgtttactcgccagtgcgcagaaaatcctaagtacaatccttgcttgttcgagtatgtctattttgctcgccctgattcctttatcgataaaatctcggtctacagcgcccgtgtacgcatgggtcagaagttaggggctaaaattgccaaggaatgggaagatctggatatcgacgttgttattccgattcctgaaacttcctgcgatatcgcgttagaaatcgcccgtattctggataaaccgtatcgccagggttttgttaaaaaccgctatgtgggccgtacctttatcatgccggggcagcaggaacgccgtaagtctgtgcgccgtaaactgaacgccaaccgcgccgagttccgggataaaaacgtgctgctggtggatgattccatcgtgcgtggcactacgtccgaacagatcgtggaaatggctcgcgaagccggagcgaagaaagtttactttgcttccgctgcgccagaaattcgtttccctaacgtttatggcattgatatgccgagtgccaatgagctgattgctcacggacgtgaggttgacgaaatcaaacagctgatcggcgccgatgccctgattttccaggacttaagcgatttgattgacgcggtaggtgaagacaatccggatattactcagttcgaatgctcggtatttaacggcatttacgtcactaaagacgtcgatcagagctatctggaatatctggagtctttacgtagcgatgacgctcaggcgttgcgtagtcaaaatgaagcagaaaaccttgagatgcataacgaggggtaattctccgcacgctatttcgctggttcagtagcgttgcagcgttaagtgccaaggggctttctgggtattaaaaaggtgcaaccggctaatcaaagcggtgcacctttttttgtcatatcttgctaatatttctgtgatacggcacagtttgtccctattccattatttttccgcatttttctttgaatacgcggccagtttgaggcagttcttcatgaggcgacttattatcggtatttccggcgctagcggggcgatttacggcgttcggctattacaggtgctgcaaagcgtcgctgatgtggaaacccacctgattatcagtaatgctgcccggcaaactttggcgctggaaacggatctgagcctgcgagatgtacaggcgctggccgacgtggttcacgatgcccgagacattgctgccactatttcctccggttcctataaaaccacaggcatggtgattctaccgtgctcgatcaaaaccctatccggcattgtacatagctataccgacggactgctcacgcgtgctgccgacgttgtgctgaaagaacgccgcccgctagtcctgtgcgtgcgtgaaacgccgctgcacttaggccacctgcgcctgatgacacaagctgctgaattaggagcggttattatgccgccggtgccggctttctatcatcggccaaccagcgtacaggatattatcgaccaaaccgttaatcgggtaatagatcagtttgatatcgaattgcctcaggatctgtttgttcgttggcaaggctcaaattaacaatatttccccaaattgatacatttgtgcaacatcgcactaaaattaaacagattatgcaccacaatgatcctgcttagtttcctgcgtagttggacgaatttcgcattttgtcctgtttgcgggcgctgacgtctttcgaactgtcgattttagtggttatcgcgctgataatgggactgatggaaatcctttcattattcgtcattactggcacgattactgcaaattgatttacgaaagctcagggacgacaaaatagcaacgtactccgtggcatcgaaaatcaatttgagggtaatgtatgaaaaagcagatattggccatttctatggtactggctctggcaaccgccagcagcgcctttgctgccatacctaagacgttgaaagtaggcaccgatcctacttatgcgccattctcgtctaaaaatgccagcggtgagttggtgggtttcgatattgatttagcgaaagaactctgtaatcgcattgatactaaatgcacctttgtcgacagcgatttcgatgcgctgatcccctctctgaaagcgaaaaaaatcgatgccatcatcgcatccttgtccattactgagaaacgacagaaagaaattgccttcactgacaaactctacgcggcgaactctcgcctgattgcccagaaaggctcgaccattcaacccacgctggaatctctgaaaggcaagcgcattggggtattgcaaggttcaacccaggaagcgtttgccaatgctttatggcagcccaaaggggtagatgtggtggcttatcagaatcaggatctgatttatgccgatctggcttctggtcgtatcgacgcggccttccaggatgaagtggcagctagcgaaggcttcctgaagcaaaaaggcggcaaagattatgcctttgccggtccttcggtaaaagatgacaaattcttcggcgtgggtactggtatgggcttacgtaaagatgataccgaactgaaagcggcgctggataaagcctttgccgaaatgcgcaaagacggcacttacgacaagctggcgaagaaatacttcgattttaacgtttacgactagttttaccgacaggttgctcagcctctgccgcaatggcagaggcaatttctgacaaccaaccagacccacactcagtgatagcaggaaaaaccgatgctggatggatattccaaactgatatttgatggtgcgctggtgacgctggaattagcgttgtgctcggtgctgctggccttggtgataggcatggtgggcgctggggggaaattatccgctaatcgcttgttgtccggcgtatttgagtgttacaccaccctgattcgcggggtgcctgatttggtcttaatgctgctcatcttttacggtttgcagatcatcttaaattccatcactgaatctctgggattcagtcagatcgatattgatccattatctgccggtattatcacgttgggttttatttacggcgcgtattttaccgaaaccttccgcggtgcctatatggccgttccccgtgggcaaatcgaggcggcgactgctttcggtttttcccacagcaagatattccgtaggattatgtttcccgccatgatgcgctacgccttgcccggcattggtaataactggcaggtgatcctaaaagcaacggccttggtctccattctgggtttaaacgatgtggttaaagccacgcaactggcgggtaaagggacttacgagccgttcttctttgctatggtggccggtgcggtttatctgatcttcaccacgttatccaatggtgtgctgtggtggctggaacgccgttattctcaaggtgtgaagagggctgagctatgatggatattctgcatcaatactggcagtcactgctttggagcgatggctaccgttttaccggcgtggcgataacgctgtggctgctgatttcttcggtggtgatgggcgggctgctggcgattccgctggctgtagcgcgggtttcaccaaatcgcgcgattagcctgccggtatggttcttcacctatatctttcgcggtacgcctctctacgtacagcttttggtgttttactccggtatgtacagcctagaaattgtgcgcggcagcgagtttttaaacgcctttttccgcagcgggctgaattgcaccattctggcgctgacgctgaatacctgtgcctacaccacggaaatctttgccggagccatccgggcggtgccgcagggggaaattgaagcggcgaatgcctatggtttttcccgatttaagctctaccgctgcattattttaccttcggcgctgcgtatcgccttaccggcttacagtaacgaagtcattttgatgctgcactccacggcgctggcttttaccgccaccgtaccggatatcctgaaaatcgcgcgggatatcaacgccgcgacctatcaacctttttacgcttttggcatcgcggcggcgctgtatctgataatttcatttggtttgatcagcctgtttcgtcaggcggaaaagcgttggttggcacatattaagccgcagtcgacgcattaaaggtttatcccgtcggggctacgggatggggcattttaaatcagggatgcgcaggctccccgctggcgccaagtacggagagaatgatgataacaacatccgaaaccaaattagccgtgatcgagctgcataagcactatggcgagcatgaagtattaaaaggcgtatcgctatcggcgaaagccggtgacgtgatttccattattggatcatcaggatcggggaaaagcacctttttacgctgtatcaactttctggaaaaacccagtgaaggttcgattagcgtgaataatcaagacataaagttagttcgtgataaagacgggcaactgaaagtattcgataaaaaacagctgcaactgttgcgtacccgcctgacgatggtattccagcattttaatctgtggagccatatgacggtgctggagaacgttatggaagcgccaattcaggtgctcggcctgagcaaatcggtggcgaaggagagagcgattcgctatctggataaggttggcattgatgaacgggcgcggcaaaagtatccggttcatctgtctggcggccagcagcagcgggtttccattgcgcgggcgctggcgatggagccggatgttttgctatttgacgaaccgacttcggcgctggatcctgagttagtaggagaagtgctgcgaattatgcaaaaactggcggaagaagggaaaaccatggtggtcgtgactcatgaaatggagtttgcccgccacgtttccaaccatgtgatatttctgcataaaggtgttattgaggaagaagggccaccggccgaattgttcggtaatccgcaaagtgcgcgcctgaaacagtttctttcaggcgcattgaaataatcaaaaaaatggataattagaggtgcggacgaggaagcggcttttgcagcacatctcgcagcgcctcttccaaatcaaaataacggaaaccgaaaccagcctcttctatacgtttcggcaatgctctttggctgcctaacaccaataccgcggattctcccatcagtagccggataacggtggcagggacgcgcataaaggccgggcgattcaatacgtcccccagcgtggcgctgaactgctcattatgtaccggataaggcgcaaccatattgaacgggccgtgcagctcgtcgctggttagcaggtaatgaatgccattgaccatatcatccagatgaatccatggcagatattggcgtccatctccgataggtccgcccaagcccagccggaaaatcggcaacatttttgccagggcacctccgtcggcagccagcactacgccggtacgcaacaaacacacgcgcgtctgcgggctttctgccgccaacgccagattttcccaacgttggcaaagctgatgggtaaattcatcatgaggagtttcttcctcagtgacaaaagagtcgccctgatcgccgtaaaaacccacggcagagccagaaattagcactttaggcggttgctgaccggctttaatcagattggcgatacgctcggttatttgccagcggctttggcacagacgttctttttgctgcgccgtccagtgcttatctgcaataggttcaccggcgaggttaattaccgcatcaaagtcatcgaggttctgtcggtcatctagcgtagaccagcaggtaacctgttgacctaacacccgtttagcgcgctcgggatcgcggctcagcacggtcacggtgtgcgagaggcttagcagtcgctgggtcaggctgcggccgatcagccctgttgcgccggttatcaagatacgcatggtaaacctccgtttatctctggcccagtttcaccctcggcgcagttcctgatgatctaatcatcacatcagtttgtctgcggaaaatctgagtaaaaagtctttttcgcgctcttttagcataggcgatccggggcatttatcccacgatagagagcacatcctgagtgaattatttctaacaggctgcggcgataaatggccagtaaccaaatgatatttcgattaataaaccgcgaagaaacggataaaacgaggcattccagagaaaatcactggattgctcaaaatattcgattaatgacttatctctttactttcgctgccgataacactttataggtattggcgaatgagtatgagcgagaaagcgatgagctgccagcgcggtgaaatagcaagcctgagttcgaaatagagcaggcaacgcggtctgcgaagtcatcagcttgccggtgtctgtgtaggggattttctgatatgaggtataaatgccccactgcggggcattgatggcaacttagctggctttggctagctcataggcgcgtagcgttgccgggcggctggcaatgctctggaaccagcgttcgacggcgggatagtcggccaaatcgatattctgatttttatgggaaacaacccaaggataagtggcgatatcggcaatactgtaattttcaccggccaggtaggcgtgtttttgcagttgggtatctaacacaccgtacaagcgctgggtttctttctgatagcgttcaatggcgtaaggtattttttcggaagcataaatgctgaagtgatgattttggccgagcatagggccaaaaccgccgacctgccagaacagccattgcaaggttgccgtgtgttcacgtagctcagcgcttagaaatttaccactcttttcagccagatacagcaagattgcgccggattcaaaaatactgatgggatcgccgccgccgtctggacgatgatcgacaattgccgggatcttattattcggtgatatagcgagaaaatccggtttgaactgatcgccggcgctaatatttatccggtgaagattataaggtagtccagcttcctctaaaaacagggtgatcttgtgtccgttaggggttggggcgtaatagagatcgatcataacattctccaaagcgacatcagacagggggaaataacgacttcatttgttttttaacaccaaaacaggctcaggcacatggaaacaaggtaacaaactgagagtgaataagtgaagataaattgatctacgtattgtccacaaatctacagtaaataagagaattcagtgtgactttgataggttacctgaatcaaaatcacttcaacgctggggcacaatttagccataaatatgacgagtccccttatttatacttgcttgcaggatttctgctagagtggaaacactgtgtcgagggagcttaagtacacatgaaactcaatattgagattaactgctcttatgtatgtgagccgatatacaggaaggatggcagcctactcgctgctgaattgctcagccgttttacgacaaaacctttggatttaccgattaatccggaagatttttttaacgagttagacagcgaggggaaaggaaaactgttccgcgatcagctgttggcagcgcagaagtatagccagtggtttatcgataatcaggtactgctttccatcaatattgattttgatacggcaggaattattgtcagagacagcgaattgcaggcgttactaaataccatgccgtttttgcgtctggaattaatggagactttctccaatttatccgatggtaacaacaatccgttgctgcgagacttggttaaactctatccactatggttagacgatcttggacgcggagattccagtctgaacgcggtgacggccaatatcttcgaatatgtcaaaattgataagcactttttctggcagcataataagcacaccttcccaattctgattaataacgtcaaaaaatactgcgaaggcgttatcgttgttggcgtagaaaatcagatcgaatccgagcaattgcagggcagtaatattgatgccatgcagggttatttatttaactctctgactttggatgaactgacccaaacaccccgctaacaggtcgttaagttatgcggttaactttcctgcaccaactgacgattttctctacgataataccggtattgcacaaatgaaggcgctgttttactcaatgcgctggtaataagtcgtttattctcggaataatctcaattattgaatgttaaactaggccgtatttattaatgagggctgagacggcgataacctgccagacgccgttgctgatgatcaaaaataaggtgatgccatgaagttaatgtttgcttctgatctacatggttcgcttactgcaaccgataaagtattggaaatttttaaccgtagcggtgcgcagtggctggttttgttaggtgatttgctcaaccacgggccgcgtaatgctttgccggaaggctatcagccggcgcaggttgccgagcaacttaacgcttacgctgatcggattattgccgtgcggggaaactgtgacagtgaagtggatcagatgttgctcaactttccgatgatggcaccctggcagcagattattttaccggaaagacggttgtttttaacccacggtcacctttatcatcctgcggaacgtcctccattgcgttgcggggatgtcttggtttatggtcatacacatctgccgcaggctcagctacagggtgatgttttttgtttcaatcccggctcggtcagtattcctaaaggcggtaatccagcgagctacggcatgttggatcaaggtgagttgcaggttttgaccctacaagatgataaacctcttgcccggttggttttaaccgatgagttttaaacgccgagggttatcgtcggttaaaaatacgcgttttacacatacttataatgttgtttttgaaaaacacttgatcaacaaatgcgcgcttatcgtcgcgcccagatagaaggtttcagaggatggtggagcaaaatccaacagtgagcacggaatgggttgatattgttgatgagcaaaatgaagtgattgctcagtccagtcgtcaacaaatgcgtgctcaacgtctgcgccatcgtgctacctatattgtggtgcatgatggtatggggaaaattctggtacagcgtcgtactgaaagtaaagacttctacccgggtaaactcgatgcaacggcggggggagtggtgcaaagcggtgaaaacttcctcgaatccgcccgtcgtgaagcggaagaagaattgggtattgccggcgtgccttttgccgagcacggcctgttctattttgaagaggagtgctgtcgcgtgtggggcgcattatttagctgtgtttctcacgggccttttgcgctgcaagcggaagaaattgatgaagtgcgttggatgttgccggaagaaatcaccgctcgttgtgatgaattcactccggattctctgaaagcgctatctttgtggctgagccgcaataacgaacaggattacggtaagattaccgttcgggaagattaacttcgccgataatctcgcggttatcaataagtgttgctggcaatgaataacaaaaggctccgaataatcggagcctttttcatatcgaatatgagtaaaatcttagcgaacgataatacccaatagaatgcccagcgcgccgaagtcagcgtcgctgaaggtcgtattggcaaaaccaatatcacccagcactggcagtaggaataccggcaagaaggtaatcagcaggccctgggcgaaagcccccagaatcgccccgcgacgaccaccggtcgcgttgccgaacacgcccgcagcggcacctacgaagaagtgtggaacgacgcctgggataatcaccgtcatattcagtaggtacagggcaaacataccaatcaaaccggcggcgaagctgctcagaaagccgaccaataccgcattgggtgcgtaagggaatacgactgggcaatccagcgcaggtttggcgttaggtaccagtttgtctgaaatgcctttaaatgccggtacaatttctgcaatcaccatgcgtacaccttgcagaatgatataaacacccgctgcgaaggtaatggactgcatgatagagaacataaaccagtttttgccgccgctcagttctttcaccacatcggccccggcaaacaggcaggttaccaggaagataatgctcatggtgaaagagatggcaactggcgtatcccgcaggaacagcaggcttttcggcacgttcatgtcttcggtcgaatgttctttattaccgaatttgctgccgataaaaccggccagcacataagataacgtcgagaaatggccaatagccacgtcatcggaaccggttacttttttcatgtacggatgagcaatcgcagggaagaacaccattgccacgccgacgaccaatgaaccaacggctatcagcgtaataccgctcatgcccgccgttgccagaatcactgccaccatcattgacataaacagcgtgtgatgaccggtcaggaagataaatttccatggggtgaaacgggcgatcagaatattgatcaccatagcgaagaacatgatcatcgccatttctttaccgaagcttttttgcgccacggagacaatggcttcgttgttcggtacgacgccctgaataccaaaggcgtgctggaaaatgttagcgaaatcacccagagaggaaaccaccagaccggcaccggcacccaaaatcacaaaacccatgatggttttgacagtgcctttaatacattcggttacgggttttttctgagcgattaggccgattaaggcgataaaaccgactaataccgccggttcggacaacacatcgctcatcagaaaacgaaagaaatccatattgacctccgcttacagcgcgcctaattcggttaatgcaacggacaaacgctctttcatggcttttttatcgatcatgttatccagtgcgacaattttgcccgtcacggattgcgcgatcagctgttcggcgatgtctttggtgccaacataaatatcgctcggtgtgcctttggctgagcctaaatccacatgatcgacttcagcgctgacggccagctctttcagaatgtttttaatactgatttccatcatcaggctggtgcctaaaccgttaccgcaaaccactgtgattttcattttatttccccttggaattggtgatcccgattgcttcggtggttaaaccttcgctaatcgcggattaatagcgcgcaatgacagataaaatgtcttgcgtcgttttggcgtttaacaggctgcttacgtcattatcgttatcgaacaattgagcgagttgagagatagcctcaatgtggctattgctgtccgtcgcggctaatactattaataattttaccgggtcgttctcttcggcatcgaaattgacgccggaggaaatgaccgtgagcgccagtgaaagcttattgacgccttcttctgggcgagcatggggcatggcgataccggggccaacaacgtagtaaggccctattgcctcgtgagagcgataaatggcatcgacgtagcgtggttcaacggagccattatcaatcaatggctgacatgagatggcgatagcatctcgccaatctttggcctgttctactacctgaacgacattcgccgttaacaatgtctttaacatgagatgagtcactcccgataacaattcacatgagagtagatatttcgctcattgattaatgtgatgtttatcgcatttgatagcgctacctgatagcgctatcaataattgtgatagcgctatcatttaaccgatcctggtctttggctaaatctgccccaggcatatacaatgcgactcgatatctgcgctgctaatagtaggcggagcgcaacagacaggctgaaaacggtgagtttcagcggacagggaacccagaatggaaaaaacgcgtaagcgccgtaacaccgggagagtcacgctgcaagaggtggccaactacgccggtgtcggaaccatgaccgtttctcgtgcattgagaaccccggagcaggtttctgacaagttacgggaaaagatagaacaggcagttgaagagcttggctatatccctaatcgggcagcaggtgcgctggcgtctgggcatagcaataccgtagcggtgctgattccatcgctgacagataagtcaagctcgcgctttatgcaggctttacagcaggtgctgaataaaaacgaatttcagctgttactaggctgtcacgaacacaatcagcacaaagaagccgaaattttaatgaccttattgcagagtaatccggctgcgctggttatttttggttctcagctggcagagaaaacctatcaaattcttgagcgagcaaatattcctacagtgaatgttgttggctcgcgttacagcaaggctgaaatcacgctggaggcggcgttttttgaagccgcgcataaactgacggatcatttgctggatcaaggttatcagcatattggttacgtgggcgcgcatatggataaccgcttgcaacggcaattgctcaatggttggcataaagccatgctgagccgctaccagaattcagatcagattgtgacgactccggaagccgccagcctgcaatttggccgctatgcgctaacggaaatgctgttgcgtcagcctgagctggatgcggtgatttgtagccatgaagatattgcgttgggcatcatgtttgaatgtcagcggcgtttgctgaagatccccggtgatatagccgtggcttgtctggatggctcagacagttgtgaccaaacgcatcctaccctgacgtctattcgtattgattacaaaaaaatggggcgggaggccgggaaactactcattgatatgctcaatgatagtgatgatgacgaagaacctcggacgcagaccttcagttaccagttagagttgagacaaagcagttaaggcagttaaggataggcgggcagatttcaccgtttaaaccataaaaaacgccagcgctaaggctggcgtttatcattcaaaccgaagcgtaaattaagacgcgtcggcctgagcagactgaatagcagtcagagcgacggtgtaaacgatatcgtctaccagtgcgccacgggacaaatcgttaaccggcttgcgcataccttgcagcattggcccgatagagaccagatctgctgaacgctgtaccgctttgtaggtggtgttaccggtgttcagatctgggaagatgaacacggtagcctgacctgcaaccggagagttaggcgctttggatttcgctacgtcagccatgattgccgcatcgtactgcaacggaccatcgatgatcagatctgggcgtttttcctgtgccagacgggtcgcttcacgcactttctcaacgtcactacctgcgccggaattaccggttgagtaggaaatcatcgcaacgcgtggttcgataccgaaagcggccgccgaatcagcagattgaattgcgatttcagacagctgctctgcggttggatccgggttgattgcgcagtcaccgtaaaccagaacctggtcaggcagcagcataaagaacacggaagaaaccagcgagctgcccggtgcagttttgatcaactgtagcggtggacgaatagtgttcgcagtggtgtgaaccgcaccggaaaccagaccgtcaacttcgccttgttccagcatcagcgtacccagaaccacgttgtcttccaactgttcgcgggcaacgacttcggtcatgcctttgctcttacgcagttctactaaacgtggaacataacgttcgcgtacggcaaccggatcaacaatctcgatacctttacccagttcaacgccttgagcggcagccactcgacgtatttcgtccgggttacctaacagcacgcactcggcaatgccgcgttcagcacagattgcagccgcttttacggtgcgtggctcgtcgccttcaggcagaacgatgcgtttgccggctttacgtgccagttcggtcagctcgtaacggaatgccggtggagacagacggcgtgaacgctcggaggtggcgctcagtgagtcgatccactcgctgttgatatggctggcaacgtagttttgcagcttttcaacgcgctcatggtcgtccgcaggcacttccaaattgaagctttgcaggctcagagaggtctgccaggtgttagtgtcaaccataaatactggcaggccagtctggaaggcacgttcacacagctgtttgattggctcgtcgatagcgtagccaccggtcagcagaattgcgccgatttcaacaccattcatcgccgccagacaggctgaaactaatacgtctgggcggtctgcggaggtgaccagcagagaacccggacggaaatgctccagcatgtgaggaatgctgcgcgcacagaaagtcacggatttaacgcggcgggtattgatgtcgccttcgttgataatacgtgcgttcaggtgtttgcacatgtcgattgcgcgggtagcaatcagctcgaagctccatggcacgcagcccagaactggcagcgggctgttggcaaacagctgagtcggatcgactttcgctacgctggccttggtggaatcatcaaagatttcagacaggtcagggcgagtacggccttgttcatcaaccggggcattcagtttgttaatgataacgccggtgatgtttttgtttttgctgccgccgaagctggaacgagccagttcgatacgctctttcagctgatctggagaatcgttacccagcgccagcacgaacacgatttctgcgttcagcgttttagcaatttcatagttcagcgcgttggcaaactggtgtttgcgggttggcaccaaaccttcaaccagaaccacttcggcatctttggtattttcgtggtaacgcgccacgatttcttccatcaacacgtcctgctggttagaactcagcagagtttccacgtagttcatattcagcggctcggcagcggtgatgctggagttggcgcgaatgatagtggtggtctggtcaggcgcatcgccaccggaacgcggctgggcgataggtttgaacacgcttaagcggacgcctttttgctccatggagcgaatgacacccaggctgacgctggtcagacccacgctggtgccagttgggatcaacataattgtacgggacacggctaaacctctttacggttgcactcaggcgacggttctcgcctgctgtcgggcgaaaacaacaccgccagccttggctgacggtgttgaggagacttatgcagtcagacgggctgcgtcttgtgcgataacaaactcttcgttagttgggattaccatcgccagacggctgccatctttagtgatggtgccggatttaccgaagcgagcggccaggttacgttcgtggtcaatttcgaagcccagcagacccagtttatccagagtcagttcacgtaccatagctgcgttttcaccgataccgccggtgaagataaccgcgtccaaacggccgtccatcagtgcagtgtaagcaccgatgtatttggccaggcggtggcagaatacgtccatcgcgcgcttagcgtcagctttggtgtcgtagttgtcttcaacgtaacggcagtcgctggtgacttcggtcagacccatcaggccagactctttggtcagcattttgttgatttgatcaacgctcatgcccattgcatcatgcagatggaagatgattgctggatcgatgtcaccgctgcgagtccccatgaccagaccttccagcggggtcagacccatagaggtatcgacacatttaccgttgcgaactgcggtaacagaaccgccgttgcccaggtggcaagtgatcacgttcagttcttccattggcttgttcagagccttggccgcttcctggctaacgaagaaatggctagtaccgtgtgcgccatagcgacggatgccgtgatctttgtacaggctgtacggcagggcgtacaggtaagattcttctggcatggtctgatggaatgcagtgtcgaataccgcgacatttttattagccagattcgggaaggatttcaacgcctcagcgataccgatcaggtgcgctgggttatgcagtggtgcaaacgggatcgaatctttgataccctgaataacttcatcgtcaataattactgatgaagtgaatttctcaccgccgtgaacgatacggtggccgacagcagtcaactgggcagaaagctctggtttttgtgccagaatagtattaacaatgaaattcagtgcttcgctgtgcgctgcaccagcacccaatgctgcttcttgtttgccgccatccattttccatttgatgcgggcttctggaagatggaagcattcggctaaaccagacaggtgttcttcaccgttggtcgcgttgatcacggcgaatttcagggaagaactaccgcagttaagaaccagtactagcttactcgacatggaagtacctatttattgtcgtgtttgcaataaacacgtggttaataaaacgtcaatctgaccacaagcgtagcgcataatggtgatgacattaatgattaacatcatgcgataaatgaaaaaggcatgatggtggaaaaatcgctgatcaagtgtttaaaacctggtggttaaaatgcatcaacgatttaacaaaaatgattaatttgctgctaaaagttgacatattgtgcgtcttcttctagcggccaaaaggccgggctaggataccgatagcgcgcgctaaaaacaaaatatatttaatccatccaatttatcattggtgggttgcaagaaaattttaaattttgtctttgaagttgaggtgagccatgacatccaaaccttccgattccgttagctggtttcaggtcctccagcgcgggcagcactatatgaaaacctggccatcagacaaacgtctggcgccggtgttcccagaaaatcgcgtagtgaatgcgacgcgcttcggtattcgctttatgccgccgctggcgattttcacgctgacctggcaaatcgcgctgggtgggcagcttggccctgcgattgctaccgcactgtttgcctgtggtttgccgctgcaaggtttgtggtggctgggcaagcgctctattacgccgttgccgccgactttgttgcaatggtttcacgaagtgcgcaataaactggctgacgccgggcaggcggttgcgcctatagagaaaactccgacctatcagtcgctggctgaattgctgaaacgggcgtttaaacagttggataaaacttttctcgatgatttataacttttgcaacgataactaaatacaaatccgagagtcggcagcggctctcggtgaatcctttcaccaaaccccctgtcaaatcaaagaatggcccgctagtagtaccactgaaagatgcgctatgcgatgatttcaccattaacttgcctttcaggagatcatgatggatatgactaacgcccaacggctgatcctttcaaaccaatacaaaatgatgaccatgttagatccggataacgccgagcgttatcgtcgtcagcaaaccattgtcgagcgcggctttggtctgcaaatgcgcgagttggaccgtgattttggtgagttaagcgaagagacctgccgcaccattattaatattatggagatgcaccacgcgctacaggtgtcttgggacaatctgaaagataagcaagatctggacgggcgccgcatcgctttcctcggtttcgatgctgccaccgaatcccgctacctgagctacgtgcgctttatggtgaataccgaagggcgttatacccatttcgattccggcactcacggtttcaatgcccaaaccccaatgtgggataaatatcagcgcatgctgtctatctggcagtcttgcccgcgtcaatatcatttgagcgcggttgagatttcgcaaatcattaatgcctgattaatcacccgcaaagccgcgactgatcgagcgagacgagggggaataggccattggctcggtggaggtttgtccattacggtgcccataggtatattaccccctcgttgacccggctctgtggccgggcttgccgttaaactcaataaatagcctgatgatttaggtttcaagaggatgtgcttgtggagtgcaaaggttttctttttgacttggatggaacgctagtagattcattgcccgccgtggagcgagcatggattggctggggagccaggcacggtatcgaatcatcggtggtattggactttatccacgggaaacaggctattacctccttgcgccactttatgccggggcagagtgatgaggctattcaggccgagtttctgacgttggaaaaaatcgagtcggaagataccgaaggcgtcaccgcattgccgggtgcagttgcgttactggagcgtctgaatcaattggacattccttgggcgattgttacctcgggttccgtgcccgttgcgtccgcccgtcgcgcagccgctcatttaccgttaccggaagtgtttatcacggctgaactggttactcacggcaaaccgcagcccgatgcctatctgctgggcgcgcagcgtctggggctgaaaccggaagattgcgtggtggtggaagacgcgcccgcggggattctttccggtctggccgcaggttgtaaagtgattgcggttaacgcaccagcggacacgccaaaacgggatcaggttgatttgattctgacctcccttgagcaaatcgcgatagagaaaacgctcaacggcgcggtgattcagcgggttaagtagctttcctgcttattcattgaatctgcgataaaaaccaagagcgccttaaggcgctctttttacgtttaccgagtcccagctgcgacttaaccggctggaagggaaaaactggccgccagactctccagattttgcggtatcaccttaatcacgccgccgcgcggactatctatatcggcaatcaacataaacgagaaagagataaccagcggtaatatcaacaacatgatttttcgccctttgccgtttttaaaaccgtagcccaccaacgtgcagcagcagattgcaataatactcatcaacatccatgccgccggaggaatacggttccaccaagccgcttgagtgtaactggctgagttcaatacatcgttcattccagccagtaccagcgccatcggtggcgttggctgttgcgccgcaggttcaagcagcacagtccagagttcatcctgtagctgattggattgctggttaatttccagcagcctggctttatcgcgggtgcgataaaacagaattcgttgatctacgtagcgtatcagcaggtctttggttttatctcgcgcggcgggcgagagcaggtcggcacgcagatattcagtgctaatagcgttggcttccgcttcttcttgatttttacgtaaatcgtaacggctgatagccatggaaaaactgaagccgataatcagcccgagtagcgtcagtgtcgcaccttgaataacggtgaagttttcctgagtgttgccatccatggtctgtccgcgacgaaaaaacgcctggccgataagggcgcagccccacagcaccagaaaagtcaggagaaacagaaccagcggataattagtgatattaagcatttagcgaccttgctcttagggataatttcagcggtaactgtcacgcggctgttatacggccgcgtttacggagtcacccaaatcaggcgggttgccaccaatctagtatagtcagatgttgcccaaaccaccgatatgctcaccattaatatggatatgtatcactaacgaacaaacgactcatttccggcgaataatcagcaaatcggcaatgaattggataaaaatacgccataaaaacggtataagactgataagcgacaattttttaatcaatattgatcgcaggcagttgaactcgcggcgtttaatgctttactgataacgcccaatctttgatttccgatttgccagcgaggccattttgaatagcgaactattgtgggtattaactttacttctgatagcgataggactgtttaccactaataaattgagaatggacgtggtggcgctgttggtgattattgcctttgtgatgagcggcacgctgacgctggcggaggccaccagtggttttagcgatcccaacgtgattttgattgccgcacttttcgtgattggcgaaggtttggtaagaaccggcgtggcttatcaggtgggggattggttggttaaggtggcagggcatagcgaaaccaaaatgctggctttgctgatggttaccgtagccggattgggtgcctttatgagttccaccggcgtagtggctatttttattccggtggtgctaagcgttgccagccgaatgaaaacatcacccagtcgtttaatgatgcccctgagctttgccggattaatcagcggcatgatgacgctggtggcgacgccgcccaatatggtggtgaacagtgaactgctgcgagaaggcattcagggtttcgggtttttcggcgtcacgccaattggccttattattctgctgttgggcgtaggctatatgctgattgcccgccgctggctaggcagcaacgaaccgcgctcagataaggaaaagtggcaacgccgaactttccgcgatttaattcgggattatcgactcactggccgcgcgcgtcgtctggcaattcgtcaacgttccccactgatagggcatacgctggacgaactgcatttacgcgctcgctatggcgctaatgtggttgggattgagcgctggcggcgttttcgccgggtgatggtcagcgcaaccggtaactccgaactacgagaaggggacgtattgttgatcgatatgtccgattgtgacgtggatttacgcgaattctgtagcgatcaattgctggaaccgatggtgctgcggggggaatatttctctgagcaggcgcgaaacgtcggtatggccgaggtttctctgattcctgactccactttgatcgggaaaagcctacgggacatgacattccgcagtcgttatggcctgaacgtggtgggaattcgccgtcacggtaaagcgatggaaggaaagctggtggatgaaaaactccagttcggcgatattttgctggtgattggcgactggaaactgattcgccagcttcagtctcaaaccaaagattttatcgtactcagtttaccggcagaagtggacgaagtggctccggctttgtcacaggctcctcacgcgctgttttgtctggcgttgatggtcgcgatgatgctgaccgacgaggtgcctaacgtgattgccgcgttgatcgcttgcctgcttatgggacgttttcgttgtattgatatggacagcgcttatcgcgcgattcattggccaagtttgattctgattattgggatgatgccctttgcgctggcgctacagaaaaccggtggggtagaccttattgttcacggcctgatggatgtcgcgggcggcgcggggcctcgagtaatgctgctgtgtctgttcgtgctttgcgccacgattgggttgtttatctctaatacggccacggcggtattgatggcgcccattgccatcgcggcagcgagagaaatgtcggtatcaccactcccattcgccatgattatcggtattgccgcttccgctgcctttatgacaccggtttcatcgccggtcaatactttggtattaggccctggtggttataaatttggcgattttgtacgtatgggcgtgccgtttacgctgttggtgatggccgttagcgtgatggttgtgccgctattatttccattctgattagctttcgtccttggtgccaagagaggttggtggcactgacgtgagccagctcattaggatgggttcacgtcagcgacggatcgggattattccaagggatctaggctgatttcatccaaagacaggctgaagctaggcacgaagacttccataaagtaatccatttccgggcttttacgcaggtcgagagttttctccaatcgcgtttttgcttgggtaaactcgtgatttcccgccgaaagctcttccagacatttcagataggcgcacagggcatcagcctgtttaaccagcagtttctcatcttcactgtaatagttttcatccagcaagcagcggaaatcatgctgtaattcggtgggtaacatttcgatcagtttctgctgtgccactttttcgatttttttatattcgtgggcaatctgcggattgtaatacttgataggcgtgggcatatcgccggtaattacttcgctggcgtcgtggtacatggctaacagcgcgatgcggtcggcgttcagattaccgttgaatttacggtttttgatgattgccagcgcatgagcgacaaaggccacttgcaggctatgttctgatacattttccgttcgaacattacgcatcagcggccagcgattaatcagtttcaggcgggatagatgggcgaagaagtggctctgactcataattttctctctttgttttttctacgacgataaatcggtaatcaaacagggagtcggggtaattttaggtttatagcctaacagaagaggaggcgggttttgtaatttctcatctgcgatagcgatgatgtgaccagataacctgggttgggttttgaaagcctgacggttcagttgctccccactcgcggagacggcgataaaatgtctcgagctatgccgtagctttctgataattcgtatcggatcaggtttgaaagccttattgttcggtttttccctcactcgtcgtggaggcttgcgagcagggttgacagtcgccccagctctgtacttggtgcgaaagtggggttctgcgaattttcctcgtacacttttcgtccggcgagccagcgctagattcagctgcgggcgttatcaggatgccatgcttcctgcctctgcggctcaaggcgcgctttgaacagctgccggcccacctcctgattgcgccttattaaaatcaaaaccatttttatgaatcgctatttgcctttcacccttgatagggtttttggccccaagctggccctttcacagcacatgtgatctgcctaatgaagagcgagttgcggcattccgccagccgaagcgatgagcaagagaaccgacgccgtgagaaggcgataggtacggaggtgcggagtgttaagacgtggggaatgggggggcgcgtagtccccccaaatcaattactgatggtatgtctctaggaaccggcctagcttcccgaccgccatttctaactcatctacgcgcggtaaggtcacgatgcgcacgtgatcagggtacggccagttgaaggcactgccttgtaccagtaacactttttcttgcaacagcaaatccagcactagcttctgatcgtctttcagattgaaacgcttggcgtcgatacgcgggaacatatacagcgcaccgcgaggcttcacacaggaaaccccagggatctgattgatcaattcccaggcgcgatcccgctgttcatacaaacgaccgccgggctgaataaactcactgatgctctgataacctcccagagctgtctgaatggcgtgctgcatcggcacgttggcacataaacgcatcgaagccagcatttctaggccttcaatataacctttagcgtgcttcttcggcccgttaagcaccatccagccctgacggaaaccggctacgcggtaagtcttggacaaaccgttaaaggtcacggtcagcaaatccggtgctaatgcagcaatcgaatggtgctgcgcatcgtcatacaaaattttgtcatagatttcatcggcaaaaatgatcaaatcattctggcgggcaatctcaacaatctccagcaacagctctttgctgtataccgcgccggttgggttgttcgggttgataatcacaatgccgcgagtgcgcggagtgattttgctacgaatatcatccagatcggggaaccagtcagattcctcatcacacatatagtgcacggctttaccgctggacagggaaacagccgcggtccacagcgggtaatccggcgccggtaccagcatttcgtcgccaatatttagcaaggcttgcatggattgcacaatcagctcggaaacgccgttgccgatgtaaatgtcctccaccgtcagatcgcgcatatcccgcgcctgatagtgctgcatgatggctttgcgcgctgagtataggcctttggagtcgcaatagccttgcgccgtgggcaggttacgaatgacgtctaccagaatttcatccggtgcgtcgaaaccaaacggggcaggattgccgatgttcagtttcagaaccttattaccttcttcttcaagacgcttagcttcttttagcaccgggccacgaatgtcgtaacagacgttgtccagtttgctggatttttcaatgggggacataaaacagagccttttcactggtaaaagcgtgtcctgttcctggaacacggcaaggtgttcaatgtactccgctgccgcacatttttgaagttctatacatcgctttactgcaaatgtttatcgagggtaactgacttatcatttttcctgtttcattcatcataaaaatcttaatgattagataaaatgaagtgtttgctgtctattttctgatcgaaatgacgtgtttcggcgataaagcaaccggtaacgcataatattcatccagcaatacttatcaacttaacgcgttcccttactatttttacaataaaatattggccaatttcttttatataataagttgatagctaaatattcatgtttttatcatacatattgtagatgccagtctaaaaatggcagggaagctaaaaactataaataggaaaactattaagaacatttaatgtaagggattcattctcgcactttagtagaaaatcattagttaaatctttttgaaaagataaaccaccatctcggtgataagttgtttttttatatataaaataagcggccattaaggtgaatttaattaaaaacagtacattagaagcattaaatttagcggcaagaaatggcgttccccagcataaaaaatcttcatttatcgaagatttagcggttttttgtgacgctattcatataattggatgactggttgggaaaagatgtttttgaaaaagagataaagataacgaaatataagttatttttttgccctactctaatgagtggggtactgtcatacttaacattgtctcatttgataatgttgttagttaaacaccagggtagtttgtaattagaattcaaaaaagtgaagaatacactatgacaaatgcaaatcgtccgataattaatctcgacctcgatctgcttagaacctttgtcgctgttgctgacctgaatactttcgccgccgctgctgccgcagtatgtcgaacgcaatcagccgttagccaacagatgcaacggttagaacagttggttggtaaagagttgtttgcccgccatgggcgcaacaagttacttactgaacatggtctccagttacttggctatgccagaaaaattttgcgttttaacgatgaagcttgcacttctttaatgtacagcaatgtagaaggcgtgctgaccattggtgcatctgatgataccgctgatacgctgctcccttttcttttgaatcgggtggcaacgttgtatccgcgtttagccatagatgtgcgggtcaagcgtgggccggaaattgctgagatgctgagcagtggtgaagttgatttagcgatcaccacggcagcagttgaaagtcttccccatctgatgttgagaacctccccaacgctgtggtattgctctgcggactatcagtttgtccctggagaggccattccgctggtggtgatgaatgagccaagtccatttcgtgacatggcaatagagcatctgacacaggctggtattccgtggcgcattgcctacgttgcttcttcgctttcggccattagggcggcggtgagggcagggttaggtgtgaccgccagacctatcgaaatgatgagtccggacctgcgggtattaggcgaaacagaaggattacctcggttgcctgaaacccattatgcgctgtgcaaagatgatgcatgtgaaaatgagttagcattggcgatttttagtgccttgcaaaatggttatcagccttcattgctgaccggaacagaaccatcccagggttccgaattgtatatcgataattaataagaattatttaacatctagtgtttcgttaatcccctgtttaaacaggggatttttcgtttctaagacagtaaaaacctatttattaccgttttgttgatatttcgtgactaaaggcgcgtttcccacacttattttggggtatagcccaagacagtcaggctgcagtctagactgatatccatatagctccccgcagtattttttttcttttcgttaacacgtcttcaattgactcaaaacgatgtttcactatttttagtttcaataacagctttttatttgttaagaaactgcctaataacactcaaaacgtgttctggatcaaaaaaatacccctagctagtgagtggaagaacaggttattcctgcgacaatggtatagtaaaaacgaaagatccacgttgctttatatgtgcatgatagaactcaacaaatgactgactcgatttagctttcgaggtcgcaccaaatgttaagcaagatcgtgcgtttgtaaattaatgtgtagttacttttgtcaaagttgacaaaaggttattgaaaggagtaaaaagcccacagtaaaacactggctaaatagttgtaaagacagtgtctttgtgtggttattatccttcccttgaatcgatgtggtgcacaactgccgacacaagagcagaacgttcgacgccacttttgatgagtaagcaatgagtatgtcaacaaccactgaagttatcgctcatcactgggcgttcgctgtattcctcattggcgctatcgggctgtgcggtttcatgctgctaggtgcgttcttcctgggtgggagagctcgggcccgtgccaaaaacgtaccctatgagtccggtatcgactcggttggctctgcgcgtatgcgcctgtcggccaagttctatctggtcgccatgttcttcgttattttcgacgttgaagccttgtacctgtatgcctggtcgatttccattcgcgaaagcggctggataggtttcatcgaagccaccattttcattttggtgctgctggctggtttggtttatctggtgcgcatcggtgctctggattggactcctgggcggtcgaaccgccgcgtgagcaaaccgagcacggtcacaaattccaaaggtattccgcccgatttgcgccaataaatacagcgaggcattaacatggactatacgctaacccgcatagaccccaacggtgaaaatgaccgttatcccctacaaacacaggaaaccatcagcggcgatccgctcgagcaagacatccatcgtagcgtgtacatgggtaaacttgagcacgcgatgcatgacatggtgaactggggacgtaaaaactcactttggccgtataacttcggtctttcttgctgttacgtagaaatggtgacctcgtttaccgctgtgcatgacgtggcgcgtttcggggctgaagtattgcgcgcctcaccgcgtcaggctgacttcatggtggttgcaggaacctgcttcaccaagatggctccggttattcagcgtttgtacgaacagatgcttgaaccgaaatgggttatctcaatgggtgcctgcgccaactccggcggcatgtatgacatttactccgtggtgcagggcgtagataaattcctgccggtggatgtgtatatcccaggttgcccaccgcgtcctgaagcttatatgcaagcgctgttactgttgcaggaatccattggtaaagaacgccgcccactttcctgggttgtcggcgatcagggcgtttatcgcgccaatatgcagccagaacgcgagcgtaaacacgctgagcgtattgcggtcactaacctgcgtactcctgacgagatttgattctgtcgatttgacagtcaatctaggtacgacagctaaattcgcggcgcactgaccacgaaatgaccccggtagtgatcaaaaaagttgtggtgaaaaaaaaattatgacagatcatacaacgaccgacagcgcccagcccgcatggcaaacccgcgatcatctcgatgatccggtaataggtgagttgtcgaaccgttttgggccagaggcctttgttgttcaggcgacccgtaccggcatgccggtagtctgggtgaagcgtgaacaattgctggaagtaatgtcgtttttaagaaaacagcctaagccttacgttatgctgttcgatctgcatggggtggatgagcggttgcgtactcaccgccaaggtttgcctgatgcggatttctctgttttctatcatttgctttctattgagcgtaaccgcgacattatgctgaaagtggcactgtctgaaaaagacatgcacgtgtccacagcaaccaagattttcccgaatgccaactggtatgagcgggaaacgtgggaaatgttcggtattacctttgatggccacccgcatttgacgcgcattatgatgccgcaaagctgggaaggtcatccgctgcgtaaagactaccctgctcgcgccacggaattcgatcccttcgtgctgaccaagcagaaagaagatatggagatggagtctctcaccttcaaaccagaagattggggtatgaagcgtggaaccgaaaatgaggacttcatgtttcttaacctcggtcctaaccatccgtcttctcatggtgctttccgcattgtattgcagctggatggcgaagaaattgtcgattgcgtgccagacgtgggttatcaccaccgcggcgcggaaaagatgggcgagcgtcaatcctggcatagctacattccttacactgaccgtatcgagtatctcggtggctgtgtaaacgaaatgccgtatgtgctggccgttgaaaaactggccgggattaaagtgccggagaaggttgataccatccgcgtgatgctgtctgaactgttccgcatcaacagccatctgctgtacatcagtacctttatccaggacgtgggtgcgatgaccccggtgttcttcgcctttaccgaccgtcagaaagtctacgatgtgattgaggcgattaccggcttccgtatgcatccagcctggttccgtattggtggcgtggctcacgatctgccacgcggctgggagcgtttgctgcgcgatttccttgactggatgcccaaacgtctggattcctacgtcaaagctgctttgcagaacagtatcctgaaaggacgttcaattggcgttgctgcatacaattccaaagaagcgttggattggggcgtcactggtgctggcctgcgtgccaccggtatcgattttgatgtgcgtaaatggcgcccgtattccggttatgaaaacttcgaattcgaagtgccaatcggtaataacggtgactgctatgaccgcgtaatgctgaaagtggaagaactgcgtcaaagcctgcgaattctggagcaatgttataaaaacatgccagaaggtccattcaaagctgaccatccgctgactacgccgccgccgaaagaacgtacgcttcaacatatcgaaacgctgattactcacttcctgcaagtttcgtggggcccggtgatgccagctaacgagtcattccagatgattgaagcgaccaaagggatcaacagttactatctgaccagtgacggcagcaccatgagctatcgcacccggatacgtaccccgagctatgcccatttgcagcagatcccatcggtaatccgtggcagcctggtatctgacctgatcgtctatctgggcagtatcgattttgtaatgtctgatgtggaccgctaattatgagtgatcaaaaagagacccaggatcataaagatcaacttgatgtggtgaacctggctgtcgatgcagcgcagtctactgccgttgagcgctctgtcgctgaacagccggccaccgcacaagaagcctttgaattgagcgcggaagaacgcgatgccatcgagcatgaaaagcatcattacgaagatgctcgtgccgcgtcgattgaagcgctgaaaatcgtacagaaaaaacgcggttgggtgccagacggtgcgattcacgctattgctgaggtgctgggtattccggcttccgacgttgaaggcgtagccactttctacagccagattttccgccagccagttggtcgccatgtgattcgttactgtgacagcgtggtttgccacattaccggttatcagggcattcaggcggctatcgagaaaaagctcagcatcaagccgggtcagaccacttttgatggtcgtttcacgctgctgccaacttgctgcttgggtaactgtgaccgtggtccgacgatgatgatcgacgacgatactcacagctacctgaagcctgaagaaattgaaaagttactggagcaatatccatgacaaatccttcaggttttactcgtgaaattatccgtaccccggaaatgcatccgctgacctggcgtttgcgtgatgacaaacagccggtatggcttgatgagtaccgcagcaaaaatggctatgtcggagcagaaaaagccttaaaaggcatggctccgccggacgtcgtcaatctggtcaaagatgcgggtctgaaagggcgcggcggcgcaggtttctccaccggtttaaagtggagcctgatgccgaaagacgaaagcatgaacatccgttacctgctgtgtaacgccgatgaaatggagccgggcacctataaagaccgtctgctgatggagcaattgcctcatctgctggtggaagggatgctgatcagcgccttcgcgctgaaagcctaccggggctacatcttcctgcgtggtgaatacatcgaagcggcggtgcatttgcgtcgcgctattgccgaagcgaccgaagccggtttgctgggcaaaaatattatgggcagcggtttcgatttcgagctgattgtccataccggtgccggtcgttatatctgcggggaagaaaccgcgctgattaactcactggaaggccgccgcgctaacccacgttccaagccgcctttccctgcgtcttccggcgtgtggggcaaaccgacctgcgtcaacaatgtggaaaccctgtgtaacgtgccggcaattttggagcacggcgtggattggtatcagggaatcaccgctggcaaaagtaacgatgcgggtaccaagctgatgggcttctctggtcgggtgaaaaatccgggcctatgggaactgccgtttggtatttctgctcgtgaaattttggaagattacgccggtggtatgcgtgacggtttgaaattcaaagcctggcaaccgggcggtgcgggtaccgacttcctgaccgccgatcatttggatctgcctatggatttcgaaaacatcggcaaagcgggcagtcgtttaggtacggcgttggcaatggcggtggatcacgaaatcggtatggtttcgctggtacgtaatctggaagagttctttgcccgtgagtcatgcggctggtgtactccgtgccgtgacggtctgccgtggagtgtcaaaattctgcgtgcgctggaacgtggcgaaggccaaccgggtgacatcgaaacgctggaacagctttgccgcttcttagggccgggtaaaaccttctgtgctcacgcgccgggcgcggttgaaccactacaaagcgcgattaaatatttccgggacgaatttgaagccgggatcgcgactaaggactatggcaatacccgagccatagccggtattcagcctaacctgttaaaagcgcgctggtagcactgatgcccttgctatctataaatcgttataagtagcaaacagttataagcagcaagggtcagaattttttgattaacgcttgtaaaaagaacggtttcaaggtcgtcgtgagcgacggtcaaacgaggcagaaatcagtaagaaagagcatttcgggctgatttttgacgaagtatcaccgagcgcaacagaccttgaatgtgttctgacgcaagccacttggaagcatgctgatatggctacgattcatgtagacggcaaagaatatgatgtaaacggggccgacaacctgttacaagcctgtctctccctgggactcgatattccttatttttgctggcatccggcgctgggaagcgtcggcgcttgccgccaatgtgcggtaaagcaataccaaaacgccgatgacacccgtgggcgtttggttatgtcctgtatgaccccggccaccgatggcacctttatttccatcgatgacggcgaagcaaagcagttccgcgaaagcgtggttgaatggttaatgactaaccatccacacgattgtccggtctgtgaagaaggcggtaactgtcacctgcaagatatgacggtgatgaccggccacagcttccgtaagtaccgtttcagtaaacgtactcatcagaatcaggatctcggcccgttcatttcccacgaaatgaaccgctgtatcgcctgttaccgctgtgtgcgttactacaaagactatgcagacggcactgatttcggcgtatatggcgcgcatgacaacgtatatttcggtcgtaccgaaagcggcaccttagaaagtgagttctccggtaatctggtagaagtttgcccgaccggcgtattcaccgataaaacccactccgagcgttataaccggaagtgggatatgcagtttgccccaagcatctgccagcagtgcagcgtcggttgtaacaccagcccaggcgagcgctatggcgaactgcgtcgtatcgaaaaccgctataacggcagcgtaaaccactactttatgtgtgaccgtggccgctttggttatggctacgtcaacctgaaagatcgtccgcgtcagccgcagcaacgccgtggcaacgattggatcgctctcaacgccgaacaggccatgcagggggcggcagatatcctgcgtcaggcgaagaaaaccatcggtatcggttcccctcgcgccagtctggaaagcaactttgcgctgcgtgaactggtgggggcagaaaactattacaccggcatcgccgcgggcgagcaacagcgtctgcaattgatgctgaaagtgctgactgagggcggcatccacactccggcgctgcgtgaaattgaaagctatgatgcggtactggttctgggtgaagatttgacccaaaccggcgcgcgcattgcgctgtctgtgcgtcaggctgtgaaaggcaaagcccgtgaaatggccgctgcgcaaaaagttgccgattggcaaatcgccgcgatcatgaacattggccagcatgccaaacatccgctgtttatcactaacgttgataacacccgtatggatgatatcgctgcctggaactaccgtgcgccagtggacgatcaggcacgtttgggctttgctattgcccacgcgctggacgagtccgcgccggcagtggaagacctgtcaaaagatctgaaaggtaaagtggatatcatcgtgcaggcattggccggcgcgagaaaaccgctgattattaccggtagcagcgcgggtagcgatgcaatcatcgaagcggcagccaacatcgccaaggcgctgaaaggccgaggatctgacgtaggcattaccttcgtcgcggcagcagctaatagcatggggctggcgatggtcggcggcggttcgctggatcaggcgttggctcagttagccagcggcgaagctgataccgcaatcgtgatggaaaacgatctttatcgtcatgcggcggcggatcaggttgacgcggcgttagccaaagcggaaaacctgatcgtgttggatcatcagcgcaccactattatggataaagccagtttgattctgtctgcggccagctttgctgaaagcgatggtacgctggtgaatcaggaaggtcgcgcgcagcgtttcttccaggtttacgatccaagctactacgacgaaaacgtggtgatgttggaaagctggcgttggctgcattctctacattcgacctacactagccgccacgtagactggactcagctggatcacgtgattcaggcctgtgtcaaagcattgccgcagttgcagggtatcgtggaagctgcgccagacgcgactttccgtatccgcggtcagaaactggcgcgttcaccgcaccgttacagtggccgtactgcgatgcgcgccaacatcagcgtgcacgaaccgcgtcaaccgcaagacatcgatacgccgtttgccttctcaatggaagggaacaacagtccattggccgatcgtcagcaaattccgtttgcctgggcgccaggttggaactcaccgcaggcgtggaataaattccaggctgaagtgggtggaaaactgcgctttggcgatccgggcgtgcgcctgatcgaagctggggagggcagcctggcttacttcaccggcgtaccggcagcctttgcggcaaataccgacggctggcgtgtggcaccttactaccatctgttcggtagcgaagaaatgtctcagcgttcagcggtgattcaacagcgtatgccagcgccttatgtgatggtcaatccatccgacgcagcgcaactgggggttaacctcggtatgttggtcgagttcaactgttctggtcagacgctgcgtctgccggtgcgtttgagtgaaactttggctcagggtcaggtcggcttgccgcttggcttaccgggcattccacctatattggtgggtacccgcgttgagaacctgcgggaggcggtgctatgagctggtttacccctgaattgatcgagatcctgatctccgtcctgaaagcggtagtgattctgttggtggttgtcacctgcggcgcgtttatgagcttcggcgagcgccgcctgctgggtctgttccagaaccgatacggaccaaaccgtgtcggttggggcggctcactgcagctggtggccgacatgatcaaaatgttcttcaaagaagactgggtaccgcgcttcgcagaccgggtaatttttactctggcaccggttatcgcctttacctcgttgctactgtctttcgctatcgtcccggtcagtccgacctgggcggttgcggacctcaacatcggcattctgtttttcctgatgatggccggtctggcggtgtacgcggtactgttcgccggctggtccagtaataacaaatattctctgttaggggcgatgcgtgcgtcagcacaaaccctgagctacgaagtgttcctcggcttatcgctgatgggcgtggtagcgcaggcaggctcgttcaatatgcaggatattgttaactctcaggaacacgtctggaacgttatcccgcagttctttggcttcgtgacctttgccattgcgggcgttgcggtttgtcaccgtcatccctttgaccaaccggaagcggaacaagagctggccgatggttaccacattgaatattccggtatgaagttcggtttgttcttcgttggcgaatacatcggtatcgtgaccgtctctgcactgatagtcaccttgttcttcggtggctggcaaggcccgttcctgccgccatttatctggtttgcgctgaaaacggctttcttcatggtgatgttcattctgatccgtgcatctttgccgcgcccacgttatgaccaagtgatgtcattcggctggaaaatttgcctgccgttgactctgctgaatctgctggcgactgccgcggtcattttgtacaacgctcaataaggggtgaatgaaccatgacgttgaaagagttagtggttggtttcggcacccaagtgcgcagcctgtggatgattggccttcatgccttccacaagcgtgaaacccaaatgtatccggaagagccggtttacctgccgccgcgctaccgtggccgtatcgtgctaacccgcgatccggacggcgaagagcgctgcgtagcctgtaatctgtgcgccgtggcttgcccggtgggctgtatctctctgcaaaaagctgagcagaaagatggtcgctggtatccggaattcttccgtatcaacttctcccgctgcattttctgcggcctgtgtgaagaagcttgcccaacgaccgctatccagctcacgccggatttcgaaatgggtgagtttaaacggcaggatttggtctacgaaaaagaagatttgttgatctcgggtccgggtaaatatccggaatataacttctaccggatggccggtatggcgattgacggcaagcagaaaggcgaagccgaaaatgaagccaaaccgatcgacgttaaaggtctgatgccttaaaggagccgttgatcatggaatttgcattttatatagcagcattggtagcggtagtggcgacaattcgcgtcattacccataccaacccggtacacgccttgttgtacctgattatctctctactggcgatttccgctgtgttcttctcactgggcgcgtatttcgccggtgcgttggagatcatcgtgtacgccggtgccattatggtgctgttcgtcttcgtggtgatgatgctgaacctgggcaacgtcgatgcgcaagaacgtgcttggctgaaaccgagcgtctggattggccccggtttgctggcgctggtgctgttatcggtactgatttatgccatcagcagcgtatccgatcagggtatcagcggcgagatggttgacgcaaaagccgtaggtatcagcctgtttggtccgtacgtattggcggttgagctggcttcaatgctgttgctggcgggtctggttgttgcgttccacattggccgggaacataaacccggtgatgtgctgagcagcggcgattcagcgaaaagaaaaacggaggaacaagcatgatccctctacaacatggccttattctggcggccattctgtttgtgctagggctgtctgggttgctgatacgccgcaacctactgtttatgttgatcagtttggaagtgatgatcaacgcggcggcgttggcctttgtggtcgcgggcagttattggggtcaggctgacggacaggtgatgtatatcctggcgattacgctggcagcggcggaggccagtattggcctggcattgctgcttcagctgtatcgtcgccgtcatactctggatattgatacagtcagtgagatgcgcggatgaacctattatatttaacaattctgctgccactgcttggttttctgctgttggcattctcccgcggtcgctggtcggaaaatacttccgccaccgtcggagtcggctccattggtctggctgcgctggttaccgcttacgttgcggttgatttcctcagccagaaagccacgggcgttcaggtgtttaaccaaaccctgtggaactggatgtccgttggcgacttcagtattccattgaccctgacgctggacggcctgtcgctgaccatgctgtcggtagtgaccggcgtgggcttcttcatccatatgtatgcctcttggtatatgcgtggggaagaaggctattcccgcttcttcgcttataccaacctgtttatcgccagtatggtggtcttggtattggcggataacctgctgctgatgtatctcggctgggaaggcgtgggtctgtgcagttacctgctgatcggtttctactacaccaatccggcgaatggcgcggcggccatgaaagcctttatcgtgactcgcgtaggtgacgtattcttggcttttgcgctgttcatcctctacaacgaattgggtacgctgaatattcgcgaactgatggtactggcaccgcagcagttggaaatgggctccaccgccattacctgggcgaccttgatgctattgggcggtgcagtaggtaaatcggcgcagttgccgttgcaaacctggctggccgatgcgatggcaggcccgacgccggtttccgcgctgatccatgcggcgaccatggttaccgccggtgtgtatctgattgctcgtactcacggtctgttcctgatggcgccggacgttctgcatctggtgggaattatcggtgcggttacgctggtactggcgggctttgcggcgctggtgcaaaccgacatcaaacgggttctggcttattcgaccatgagccagatcggttacatgttcctggcgctgggcgttcaggcgtgggatgcagccattttccacctgatgactcacgccttcttcaaagccttgctgttcctctcctccggttcagtgattctggcttgtcaccacgagcaaaatatcttcaaaatgggggggctgcgtaaaaaaatccctctggtttatatctgcttcttggtgggcggcgcggcgctggcagcattgccaatcgtcaccgcgggcttctacagtaaagacgaaatcctctggggcgcactggctaccggccatatcaacctgatggttgccggtctggtgggggcgttcctgacggcgctgtataccttccgcatgatctttatcgtgttccacggcgaggaaaaaaccaaagcccatccggttacaggtatgactcataacctgccattgctggtgctgctggtgctgtctacctttgtcggcgcgttgatcacaccaccgttggcgggcgtattgccagaacttcatttaggtgaagaaggcaaaatgccgctggagatcttctccggggtgattgtggtgatcggtattctgctggctgcggcactgtatctgggcaaacgtcagtgggtgaacagcatcgggcaaagcgcgattggccgtttcttcaccgtctggtggttccacgcatggggcttcgattggttgtatcacaacctgtttgtaaaaccttatctgtggattgcacgcttgctacagcgcgatccgctgaactcactgatgaatacgccggcatggattgcacgcttgggtaatcgcggtttgacgttcagtgagaatggtcaggtgcgttggtacgttgcctcaatgggtctgggtgcagttgtcatactggctctgttgcttttcgtttagaagcctgaataggctctttaattagggacacaaaacgccatgctattaccttggctaattcttatcccctttatcggcggtctgctgtgctggcagtttgaacgcttcggtaccaaggtaccgcgctggatagcgttaatcgcgatggggctgacgttggtactttccctgcaactgtggttgcagggcggctattcactgactaatccggcgggcattccgcagtggcagtcggagttctccttgccgtggattccacgctttggcattgagttccatctggcactggacggtctgtcactgctgatggtggtgctgaccggcctgctgggcgtactggcgattctttgttcgtggcgtgaaattcagcgctatcagggtttcttccacctgaacctgctatggattctgggtggcgtcatcggcgtgttcctcgccatcgacatgttcctgttcttcttcttctgggaaatgatgttggtgccgatgtacttcctgattgccttgtggggtcacaaagcgtcagacggtaaaacgcgtatctccgccgcgaccaagttcttcatttatacccaggccagcggcctgatcatgttgattgctatcctgggtctggtatttgtgcattacaaagccaccggcgtctggactttcaactatgaaaatctactgaaaacgccgatgtcccacggtgtggaatatctgttgatgctcggtttcttcatcgctttcgcggtgaaaatgccggtggtgccgctgcacggctggttgccggatgcgcacagtcaggctccaaccgcgggttcggtggatttggccgggattctgttgaaaaccgctgcttacggtttgctgcgctttagcctgccgctgttcccgaatgcttcccacgagtttgcgcctatcgctatgtggctgggtgttattggtatcttctacggtgcgtggatggcgttctgccagaccgatatcaaacgtttaatcgcttacaccagcgtgtcccacatgggctttgtattgattgccatctacaccggcagccagttggcttatcagggcgcagtgattcagatgattgcccacggcttgtcagccgcgggtatgttcatcatctgtggtcaattatacgaacgtctgcatacccgcgatatgcgtcagatgggcggcctgtggggacggattaagtacctaccagcgctttccctgttcttcgcggttgcgacgctggggatgcctggcaccggtaatttcgtcggcgaatttatgattttgtttggcagcttccaggtcgtaccggtgattactatcatctctacctttgggctggtgtttgcgtcgatttattcattaatcatgatgcagcgcgcttactatggtgcgccgaaatcggaagaagccttgccgggtatgagcctgcgagaactgtcgatcgtgttgctgctggtggtattactggtgttgttgggcctttacccgcaaccgattctggatacctctcatgcggcgatgagcaatgtacagcagtggtttaacgcttcatcaccactagtttcaccaaacataacaacaaggccgtaattcgccatgacaataactcctcaacaactgatcgcaatgctaccgctgttgatcgtcggattgacggtggtggttgtgatgctgtccattgcgtggcgacgcgatcatttcctgaacgccaccctgacggttatcgggcttaacctggcgctgctgtctctgtatttcgtcgggcaagtcgagccaatggatgtcacgccgctgatgcgggttgacggctacgcgatgttctataccgggctggtgattatcgccagtctggccacggcgacctttgcctatccgtggttggcagggtatccggataaccgcgaagaattctacctactggtgctgattgccaccttgggcggcattctgttagccagtgccaatcatttggcttcgctgttcctgggtatcgaactggtttctctgccgctgtttggtctgattggctatgcctatcgccagaagcgttcactggaagccagtattaagtatatgttgctgtctgcggccgcatcgtccttcctactgttcggtatggcgctgttgtatgcggaatccggtagcctgtccttcgccggtctgggtaaaagcctgagcgattctgttatccatcaaccgctgattctggccggtttggggatgatgatcgtcggtctgggcttcaaactgtcgctggttcctttccagctgtggacgccagatgtgtatcagggggcgcctgcgccggtttccaccttcttggctactgccagtaagatcgccatcttcgccgtagtgatgcgtctgtttatgtatgctccagcggcggacagcgaagtggttcgtctggtactctcgatcatcgccgttgcctctattctgtttggtaacctgatggcgatcagccagagcaatatcaaacgtctgttgggttactcttccattgcgcacctcggttacttgctgattgcgttggtggcggtgcagactcatcagttggcgctggaaaccgtcggtgtttacatggccggttacctgttcagcagtctgggcgctttcggcgtcgttagcctgatgtccagcccgtataaagggccggatgcggaatccctgttctcttatcgcggtctgttctggcataaaccgattctgtctgcggtaatgacggtgatgatgctgtctctggccggtatcccgatgacgctgggctttattggtaagttcttcgttattgcgatgggcgttagcgctaacctgtggtggctgaccggtgctgtagtactggggagcgccattggcctttattactacctacgcgtcaccgtgagcctgttcctcagcccaccggagaaactggtgcgcgatactccaagcaactgggccttaactgccggtggcgttgtggtgttgatttctgcgattctggtactgttcctcggtatctacccgcagccgttgattacgctggtacaaatggctcagccgatgttctgagtccggcaataatccgccaaacggtgggttaacatgctgagataaaaccccttgccgaatttctggcaaggggttttgctttttggggggaatgtctacatctcgtcgataaattaaaacctgattgggttttcccgatggccgaaggctgagaaataacagtctcttaatttttctgtttcagagagttggctggcgggtgtacggcaggtgccctgcctcgaacggagttttctgctagagaattcaggacagaagagggcacgctaaccgatgcggccaaacctaggtaccgccgagataaaatgacgttaaatcatgtttattaatattcttatgccagaatatggtcgtatttgatcagcaatctttatttttcggataaagaatggaatgtgttttcgaggctattgatcaccgcacgcacgcgtgctgcccgttgtacgtctggatgtaaaaccagccagatatccacgggatcctgccgttcaggccagattcgtaccagatcctcatcgttatccgccagaaaacaggaaagcagcgcaatgcctaaccctttttgcgtggcggaacgcagtaatatttgcgagttgctttgcaagacgacattgggttgaaccagcgtttcaccgcataaactttgccagtggcgaggaacgtcttgttgagggaacagcaagagatcgtgaccgcgaaagtgttcgccgggtcgagggacgcctcgcacagcaatatattcatgggcggcatataaacccatattgatcgtcgccagccgcttaatgattaactcattattttcaggtctatcgccgcgaatggccagatcggcgccgtgatgcgccatattggtgatgttaatgctggttgcgacgctataactgatatctggatgctgctgacgtagcaatttcaacgcgggaagaacaaatacttcggccagcgtatccgtggtgacaagagaaaccgtgccctgtaaccggtcgtcgccgttggccgctttacgattaatcgcctctgccgccctttccatagcaacagcatcggttagaagctgctcacccaataagctaagagtgaaatgttttggtgtgcgaataaatagctttgaatttaaggcatgttccaacgctgaaattctacgcccgacggtagcctgatcgacatgtagctcacgcgctgcctggcgcagagttccggcacgcgccacggcgagaaagaatcgtgcgtcatcccagttcatcaacttttcctttcggtatcagttcgtttatgcctgtaagtttaatgtataaatgcatcaagatgatgcatttatgtctgttttgatgcaattttgcaggcgtataatccagagcttcttttgttgtctgtgacaaggtattcccttgttgtttcaccgttttaggagccatttatgtctgtgggagttgcccctgctgcccgttatttcccggtgctgtgctttctggcgttggcgctgactgcggcattactgaatagcagcgcgccaacgccgctttacccgctctatcagcagcaactggggctcaattcggtcagtttgacaatggtgtacgccgcttatgccgctggcgtgttgatttcgctattggcggtagggaatttagcgggaaagattcgggaccttcgaatgatgattgtgcctgctctggtcacggtactggctggagcctggctgtttgctattgctgatacttttggtcgcctgtttgtggcgcgattgctggctggaattggcactggcgcgctaaccggtgcggcgaacctggcgctgatccgtttttgtccgccggatggcggcaagcgggcggcgttaattgccacgctttcttttaccgctgggttggccttggggccgatatttagtggtgtagcgttacaaacccattttcatcctacggtgctcccttttattttgattattgctatggccgcgttggcagcggcaggactcacattgggctggccggaaacacgcgccttgcggcataagaacataaagctaacttgcggggccagtggtgcagtgaaacctgccggcggtttactcagtggtctcaccgctacgggaatgcggtttttcttatgcgccggtgcactgtttgtctcttgggtggttgccgccagtattctggctatcggcccggcgattgcaaagcaactgttgtatttaccggggcaaggcggatttggctatgtgattgcggtctatctgctgattgcgggtatctgtcagttggtcagccgtagtattcctagccgtatttccctgtataccggctgtctggctcaggcggttgcggtgatgacctttgccgctgcgttgtattttcattcattgcttttgggtggcatcggcatggtcgtgaccggctacgcctttggcgccatctttgtcggcagtgccgcgttggtgaatttaatttcacctaaagccagccatgcccccttgctgtcgttattttatgtgatcgcatacaccgctaactgggttcccgttgcattgggatggatgatagatcgccacggattattatcagcagctaatcttctgttctgtctgagttcgccggtttgtttgttgctggcatgggggataaaacgcgccgcgttcttcgctcatgagtgatgttttgtgattcaagtcacgatatgatttattttattgcattgttaccataataagcgtgatttgaatcgctatgaaattcaccgattcgggtaaaatgcgctcattgctacctcccgtttattgaaccgaactttatcgcgagtgaatcctgatgaacattatcctgatgattgctatcactaccggcgtgctttccggcatttggggctgggttgctgtcaccttgggtttgctcagttgggcgggttttttgggctgtaccgcttatttcgcctgcccacagggtggaataaaaggattgattatcagtttgctgacctgcgctagcggcatcttttgggcaatgatgattattcagggcagcgcattacggccagagtggacgatacttggctacctgttgaccggcgtcgtcgcatttttaatgtgcattcaggcctgccagcaatggctgtcttttgtacctggaacctttatcggcgcctgcgcgacttttgccggtggcggcgattggaagctagtttcagcctcattattagttggattgatatttggctatgccatgaagaacagcgggctatggctggcggcgaaaagagagaaactaaagaatgaagacaagcagccaagggcaatggatatcgagccagaaagctgaaaagtcggtcatcggggcagttaaaacaaaagggcgactatccgccctttttgctggaatttacagtaaatgatttgcgactttgatcaccagtttacgcagtggtgccggttcgcttaaggttcccatcgggcggtgaagttctcctgggaatagcatcaccacatcgccgggtgtcagcgtcagcagggtttcttgcgtgataccttcgaacaggccgtaatctttctcgcaatcaaaatccatagtagggcgctgcccttgcgtaccctgcgccgccccaatcacttcgcttccttccagcagaatatgcaaatcaatgtaataacggtgcaattcaggcagttgctgagccaggggcttagtctgaccgataatatgattgagatagatttcgcggccttccagatccaattccccagcgggtagagccgctaaatccatctggcagaggcgggtcagcgtgcggcgaataaccgccggataaagcgggttattggcggcactcttcagttcatccaatatcataataagccttcttttttagtaatgtgaaattcaggcgtggcagtgggcggtgtcggcctgctctaatgctgtgatgcagttttgcacgacgccagccaacggcggggtgatatcaattttgatgatgtcccgctccgtggcgtctggggcttccagagtggcaaactggctctgtaatagactttccggcataaaatgtccggcgcgctgccgcattctggccagcaccagcgaataatcgccggttaaccatagaaattgaatatcctgattgccagcgcgtagtcggtcacgatactgctttttcagagaggaacagactaaaaaaccggtttcatttttctgttgcaggctgtaagccacgtcactcaaacgttctagccagggagcgcgatcctgatcgttgagcggctggcccgaggccattttctggatattggcgcgtgggtgtaaatcgtcaccatcgatgaatttggcattcagccgtaaggccagcgcctgaccgacgcaggatttaccggttcctgcaacgcccataacaataatgcatttgcctgtcatcattttcccctgtcactcattcccagtggcttaggcaccaccgcaagtcacattcactgaggccagtcggcttaaaccgcgaccagcataccgccgtcgatgaaaagtaaatgaccgttgacgaaatcggaggctttggacgacaggtaaaccgccgcgccaattagttcttccggatttccccaacgggcggcaggagtgcgtttacacagccagtcggtaaaggctttgtcttccaccaaggctttagtcatatcggttttgaaatatcccggagcaatgccattcacctgaatattatgacgagccaactccacgcacatgccgcgggtcagcattttcactgcgcctttagacgctgcgtaaggcgtaatagtgtcgcggcctaattcactttgcattgagcaaatattaatgatttttccgctttggcgtttgaccatataacgagaaacggcctgagaaaccagaaatactgatttttggttgaccgcaatgacgtcatcccagtctttttccggaaattcggtaaaagcatgacggcgttgaattccggcattattaattaatatatcgatagcacctatctgattttctatttgctcaatggcctgattcaccgcatcgtggtcggtgacgttaaaggctgcggcgtgggcaatgaaaccggcgtcacgcagctgcgccacggcgctttcagcgcgctccgtagtaatatcgttaataattatctcagcaccaaattcggctaaccctttagctaataaaaaaccaatgccttgggcggaaccggtgattaacaccttacgattttccaatgagaataagtttttcatggtgcattcctgatagcgccgtgagcgcgattattcggtaaagggtttcgccaacggcgaggttgagtaaccggttttatttttctggtaaatagacagaaagtttttgttaaattatccgtagccgtgaataagttgatttatataaatcaacgcggcctgccttcaggcgacattattattcacagttcggtattgttttagctcagtattgttatttgacctgaaaattgaattcctttcatttgaccaaggtatttatttatctggtgatggtttgaaatctgtcatcatcaaaccgttttttagcagggtaaaccgtgattaagatcactttaaattatgttacgccgagctgttactctttacgtgagctttatcccttttggctaaacaaaaaggctggaaagataaggattgaggaagggaagatggtgggtaatgaaactaacctattgataaaacgttggcttaataataaaaatcctatctgttatgccattttaagccagtaacatgcttttcattaccccagctaacagggcataatcgattcaactccattcgccttattccgtcaggtatctcccatgaaaaatcagcgtgttacgttacaagacattgcgttactggcaggagtgacgaaaatgaccgttagccgttacctgcgcacgccgaaaaaggtcgcgcctgagaccgctgcccgcattgcgcaggtcatggttgaagtgaactatgccgatggtcatgaaggcgaggggcgcgctaaccagcataatcctcgcatcggtattttggtaccttcctttaataaccagattttttccgatttactggcgggtattgaatctgtcaccgccggaaatagctatcaaacgttggtggttaactataactataataaagatcgtgaagaagaacagatcatcaacctgctttcctgccagatatccggcctgattttgactgattctgaacatactttacgtgcagataaatatttgaatgctgctgaaattcctattgcgcaggtgatggatttagagcctcaacctaatcgaattacagttggttttaataattatcaggccgcctatgatatgacttccacgctcattgccagtggtaaacagcatattgtctggtttggttcgatgtcggatgtacgtgatcgtaaacgttatcagggatacagccaggcgatggaagacgcgcagctatcacctttgcatatcactcctaacaaagtgtcatcggtatctataggttctggcatgttggcattggcgcgacaaatgtatccgcagatggatgcgatcttttgtactaacgatgatatggcggttggcgtgttacaggaatgcctgaagctgggtatcgcgataccggctgaaatggcgatttccggctttcacgggttggatattggtcaggcaactacgcccgttttggccagcgtgactactccgcgctatgaaatgggtaaagtagccgcagaaatcttaatcaagaaaatcaaaagtattcctactatcgaacaggtggatcttcattatcgcatttctctgggtgggactatttgatatccgcgataatcattgctgcctgaacccgttaaatgctttcagtccgaatcatgtccgataaccgtgggtatgtagtggtatcgccacgttggttattggctactgattatctggcaattgataatattgcaagcgaataaattgatttatggttaaaggaattcgttgaatggaaatattataccgacgcaatgatagccagctcacgttgcaggtaacacgttttcttaacatgatttacagtgaccagtatcacaaaataaagtattgaaaaaaggttttataacggcatcgacaaaataaacggaacagaaagaaattagccgtggatgattaaaaacattaagaacagcgatgtaattaaatcatccaatcattgtttaataatggctaactgcttcggttattttttattttattttactgtcaggtgctcaatgatgaaaaaaaaccaaccggccgtgctgattattgctccagtaatggattatctgaccgataaactggacgctaactttaccgttcataaactgtatctattggatgatgccgccagttttctgcgtgaacagggagggaatatcaaaggtgtggtaacccgcggtgatattggaataagcaatgaagttatggcgcaactgattaatttagagattatctcaatctttggcgtcggtactgatgccgtcgatttggaatatactcgcgagcgaaatattattgtgaccaatacgccgggcgtgctgactgatgacgtcgcagacaccgctttggggctgattatcaccacctgccgccgtttctgtcaggccgataaattcctgcgtgctgggcagtggccgaaaagcagtttgccgctgtcgacaaaagtaaccggcaagcgcctggggatttttggcatgggacgcataggccgcgctattgcgcgccgtgccgccggtttcgacatgcaaattgcctataccgataatactcacgatcgtgaattgccttatcagtttgtgcccgacctgatcgatttagcgcgtcaaagcgatattttggtgattgccatttccggagggaaagacagcggcggtctgattgatgccaaagtgtttgccgccatgccggaacatgccattctgattaatattgcccgtggcaatatggtgaatcaggatgatctgattgcggcgctacagcaaaaaactatcggcggagccggattggatgtgttcgctaacgaacctcatgtgccgcaggcattaatcgagttggaaaacgtggtgctattgccacatattgccagcgccaccgttgaaacgcgtatgcaaatgagcgacatggtattttctaatatctctgcttatttctctgagcaaccggtaccgacggcgattaagtattcattagtttgagttgattcgtatcagggttaattaatttagccctctcgaaataataataaaaataaattatcacatcgtgcattttaaaataactggcaaattaattctaatttgctgacggtattctctgcgccagccatccgaatcgcagagtaaatattgctatagaagaggcgtgttcaatatggacagtaagattcctaatgcccgttggttccgcattattgttcccatcatgattgcctgtattatttcctttatggaccgggttaatatcagcttcgcattacccggtggaatggaaagcgatctgggtattaccagccagatggctggtttagccggcggcatcttctttattggttatttatttctgcaagtccctggagggcgtattgcggtacacggcagcgggcgtaaatttatcgcttattccctgtgcgcctgggcggtcgtatccattctgaccggatttgtgaccaatcattatcagttattattcctacgctttgttctgggcgtctctgaaggcggcatgttgccagtggtactgaccatggtgagtaattggtttcccgagcgtgaaattggccgagctaacgcttttgtgatgatgtttgcacctatcggcggcatgttcaccgcgccgctttctggctatatcattaatatattggactggcgctggttatttattctggaaggcacgctatccgctattgtattagtgatgtggtggtttgtgattagcgatcgcccggaagaggctaagtggctctctgaaaaagagcgcgattatctggtgactgaattagcccgtgaacgcgccgaaaagatgcataataaactggtcacccatgcgccgctgaaagccgtatttcagaataaaggtctaatgaaactggtggcacttaatttcttttaccaaaccggtgattatggttataccctgtggttacctaccatattaaaaaatctgaccggtggaaatatggcgtcggttggcgtattagccatattgccttttattgcgacaactttaggtatttacgctatttcctatctatcggataaaaccggtaagcgccgtttgtttattatgctttccctgttctgttttgccgctggattaatcacgtcggtcatattccgccataacgtgatggtgtcctatctgtccctggtgttctgcggtttcttccttaaagccgcgaccagcccgttctggtctatccccggccgaattgctattccggaagtggccggtggggcgcgtggagtgattaatggtttaggtaatttggggggattctgcggcccgtatctggtgggcgtcgtgatgtttttctacggtcaaagcgcggcggtttgcatgctggcggggtcgctggtcattgccggtttgattacgctatccctgccaaaagactgcgatttgaatgtggctcccaaggaaaaaaaacctgtcgatagcgcgttagctaaagtgaaaaccgtttgaatcaggcggattgggcgctgagagtgcccaacctgctgccggagatgactatgaacttatcccaacaaattgccttatgtcagcaacacttacaggtactgcagttttcccatttcaaccatcagctagcctggtcgctaggcgaaagcatcaggcaacgcgccgagcggcaacatcttgcgctggcgatagaaatcaatgtgaatcatcagtgtattttcagttatgccatggcaggaaccacgccggaaaatcaggactggctgcgccggaaacggaatgtggtggagttactgaatatcagctcttacgaggccgggctgatgttgcaacagcggcaaaccacgcttagcgagcgctacggcgttaatccacgggattatgccgcactgggtggtggttttcccttgcagattaggcaatcgggcgtgattggcagcatcaatgtatcgggcgccccgcatctggatgatcatgagttcctcctgctgacgctatctgagtttatcggtttgcctgcgggcagcgtggaatccctccgcgagctggacaatacgctatgacgataaatccaacggtggaacgagttactcagcgaattgccgctcgctctctggctacccgaagcgcctatttgcagcgcatagcggcggcaaaggagtgccgagtacgccgttctctgctgggctgtggcaatctggctcacggttttgcagcctgccagccggaggataaaactgcgctaaaaaatcagctaagcagcgatatcgccattattacgtcttataacgatatgttgtccgcccatcaaccttatgccgattacccgagtcagatcaaagctgctttgcatcaggtgggtgcggtggggcaggtggcgggtggcgtaccggcgatgtgtgatggcgtcactcaagggcaggatggcatggagctttccctgatgagccgggatgtgattgccatgtctgctgccgtggggctttctcacaatatgttcgatggcgcactgtatctgggggtgtgcgataaaattgtgcctggtctgctgatggcggcgttgtcttttggtcatctgccagcgatttttgtcccggcggggccgatgggaagcggtttaccgaataaagagaaagtgcgtattcgccagctctacgccgaggggaaaacggatagacaggctctgttggaagttgaggcggcgtcttatcacggtgccggtacctgtaccttttatggtactgctaattccaatcagatggtgatggaggttatggggctgcatttgcctggggcgtcttttatccagccggacgatcctttgcgcgaagccttgaccgcagcggcggcacggcaaattacgcgactaaccgaagtcagcgggcagtatttaccattgggaaaattggtggatgaaaaggttatcgtcaacggcattgtggctttgttagcgaccggcgggtcgacaaaccacaccttgcatttggtggctatggcgcgggcggcggggatcatcattaattgggatgatttctccgatttgtcgaactgtattcctcagctttgccgaatttatcccaatggcccggcggatattaatcattttcaggctgcaggtggcgtcgcgcttttagtgcgggaactactgcagggcggtttgctgcatcctgacgttgaaaccgtggcgggctttggcctacggcgttatacccaagagccttatctctccgcgggagaactgttttggcgtgaaggcgtggcaaaatctctggatcgagcggtgattgctgacttattgcagcctttcgccattcacggtggtaccaaggtgatgagcggtaatctgggaagaggggtgatgaaaacctcggcggttcctgcggaatatcaggttattgaagggccagcgctagtatttgatagtcagcatcaggtacagcctgcctttgatgcgggattgctcaatcaggattgcgtggtggtggtgcgttatcaagggccaaaagcggtaggaatgccggaattacataaattgatgccaccgctgggcgtgttattggatcgcggctttaaagtggctttggtgaccgatggtcgattgtctggcgcatccgggaaagtccctgcggcgattcacgttacgccggaggcctactgtggcggactgttggcaaaaatccgcagcggcgatcgagtacgagtgaacgggcataccggtgagctaacgctgttggtcgatgaatccgagttggagagacgccaacccgaggagccagatttatcccgctttcatcttggctgcgggcgcgagctgttcggtgcgttacgggaaagcttatccggtgccgagcagggagcctgttgtattcgattttagcaataaaaaacggcgagtgcgcgttatcaccttcgccgttttgccgtggtcgcagctgattgcccgtcacgcatggcgagcgttaacggattgttattcaatgcgaaacagctttatctctgtcctgatgcggttattttgtgattttgcgttttcggcctaatacaaaaatcagcgcgattaacaccaatacgcccacaaccatagccggggccatataaggctgtagtttcgccagcagcggaaccggcccaccggcgcgcaactcagcgacatcagcctcgctaacgctcacctgcggattgccgtaattctgtaaaacgtaattggcaatcaacgcaatctctttgtcattcaaataattgacgtaggattccgggccaaagttaggcatcaacacatgttcatttcccacttttcgatcgacaccgaataacatggcagaaatcaggttcgccggattgctggaaccggtagcggtgttattgaacagggatggataagcctgatttttgctgccgctaccgtccggttgatgacaactggcgcagttaccgctaaataatgccgcaccggtatcctgcgtatgattggcggtcgccggatgcaggccgcgcaatccttcctccacattaaccggttggccaaactggtctgccgcctgcctatccagcgggtcgcgtaccggcttggtacttttcaggtaaaccgcaatcgccagcaggtcttctttgggtaaatattgcaggctgttttgtaccgcttccgccatgccacccgccgcctgatttttacccttggtacgaccggtagccaaatattccacgagctgctcattgctccagccgccaataccactcactggatctgaagtaatatttggcgcataccaaggcccaaccatgccaccggcgaaagctttgccgtggttttcgcccatcagcagattacgaggcgtatggcaggtgtcacagtggccggggccgttcaccagataagcgccgcgattccattgttcactttggctagcgtcaggttcaaaacggcctttgtcgaggaacatcatgttccagccgatcatggcaaagcgcatattgaacgggaaaggcaattccgtcgggatattttcctcatccaccgctgcaacgccgtgcataaagtaggcgtacagcgccttaatatcctcgccgctcaggcgtgtgtaggaggtataaggcatggcgggatacaaatgactaccgtcagaccgaatgccgtcgcgtactgctcgggcgaactgttcttcggtgtagttgccaataccggcagctttggacggcgtgatattggtggagtaaatcacgcccatcggcgagctgataccgtagccgccagcgtaaggtgtaccgccttcgggcttggtgtggcaagcctgacagtcagaggcaatggcgacttgctcgcccttgtgaatccattcctgctggctgagagaagcattgtccgctgccagcgccgctgcgctgatgaaagagagagaaagcaagaaagcgccgattcgttttttcatcatttgcccgccattgaacgagccatatcgtcggctgctttcaaacccagcgccgccatagtcagggtgctatttaccacgctggcagagggaatggcgctaccgcccggtaaccataggttggcgtgatcgaaggttcgacagtttccatccactaccgaatccttcggatcgctgcccataattgttccacccataatatggttgttggcattcagactggtggtgattttgaattcatcggcttcaaacagttggccgatatgctccagctgtttgtgcgcggcctcggcaccctgacgtacgtagtcaccgacatcgtaataaatatccgggcacggcaagccgtgggcatctgtgcgggttttgctcagtgtcagacggttttccggatcgggcagcggttccaggctgatcgacaaatcagcgccgtaagccgctcggcggcggatttcctcatccagttccttgccgactaggcccatctccagcgcttgctgagtcgcaggcaaaacccggttgatattgttgagaatcatcttgttagccgaataatctttacggaactcgccgtcccgtgggccaaccaggcaactgctttgcgccgggccgcggcctagccacagcggttctttggccaaaaacgtacagtgaaaaccggagtggtccatcatgttgcggccgacctgatcggaagagttggcgataccgttcgggtttttctcattcgccgcgatcagcagtagtcggggcgtttcaatcccgttacaggctaatgcgaaggttttccccgtggctttatgagattgtttctggttatccagccagtgtacggcggtaacctgattatcctcatcggtatcaattttgtagaccaccgcttccgccagtaccgccgcgcctttcatttctgcgcgttcgatgtgatggataccgttatacatggcaccaattgggcagatcggttggcagttattgttaccgcagcaggtcgggcggccttcccacgggcgggtactgcgtccctgcggaatgggcaccgaattatagccgtgagggttaaccacttcggcaaagcgagtatcgccgtaagcccaaggcacactatccatcggataaggtttactgcgttcagacggagattgtttagccggatcgttcggcccggctacgccaatttcgtcttctgcacggcaatagtagggttccagttcgtcataagaaatcggccaatcgcgccccacgtcgtatagcgttttcatctggaaatcgttgggaacgtgacgccagcaagatgcggcccaatgccaagtggtgccgccgacggtgcgtaaataaccttgtttaaagctaccggcgcttgggccgctgagttcgacgtaattattttccgggaaatacagcggcgcggtggcatattttgactgcggataaagcccttgataatccgagccagtacggttatcaaacggcatattacgccagttttctacggcctgaccgcggctgatgcgcagaccggcttccaatactaataccgagtagccttggctgactaattggtcggccatcatgccaccgacaataccggagccaacgatgataacgtcggcagaggcgtcaccattggcgctgaaaataggttttttcattaggaatggctcacattgtcaggcttaggcaaattgatatcaggtggggcggcggtccaccacagcggaccgttaccgcagtaggttggcacgatcaggccatcgctggcagggcggtacatcagcgcatctttgtaggcgattaacaccgcctgctggccgtgtcctacggtgccggtgtaccaggctgccatgatgttactgaccactttttgcagattatggccactagccgcagccaacagttgctgggcgcgttgttctggctgcatcaatgtggtgagctggattatttggtcggcaaactgggcgtcactgttgtgtagtgcggtaaaaatccgtgccgacataccttgatcgatatctttatgttcggtcagtgcctgagacaatttgaagaagcgagcgaaagccagtgggttggcagcggcggtggcctgttcggctttagtcaaaaatgggtaacctaaaagtgaggttgccaccatcgcggaggccacgccaaacagcagttcccggcgggtgaaaccggttccatttttttccggctcaataacattgcgagatgaaatcttttccatcgagagtctctcttggatcgggtgtggtgctgaacgtcagctttgaaaatgaattattgttattttatgtagcgtttttttagaggttatatggccgcagagtgggcaaatacagtgtgagagtgtcattcaccaaggaaatcatcactcttcaatgagcggtaaattaacaagctattaaacaattttcaataagattgattaggtgtctaactatttgttgataatttgcacggtttttaacaatcctaattcgtggcgcgtcggtgagggaatttagtgccaatcttcatcaggatcaaaatggtaagcccgattataagctatggttagtagggaaaggttatagggtgtaattgattttttaatcacggagaagtcacatgagcagagtaaatgaccctcaacaaacctcgttagatgacgacttgagcatgttgaccgacacgctggaagaggtgttgcggtcatccggcgatatgggtgacgatggttatcagattgtgaaagcccgggctgaaaatgcgctgaaagcagtaagagatcgcctgaatggcaccactgattgctatatggaacgcgccaagcaggcggcctgtcgtaccaatgaatacgtgcgcgaaaaaccctggcacggcgtgggtatcggcgctaccgttggcctgatcgtcggattgttattggctcgtcgctagcgataaatctgatggagtgactcaacggctcatttatgtatgagccgttttttttggccagcatattgcgttttttcagtcagaaatccacggaaatagttacgtgtgcgactaatgattagtttttcatgtgttatttttaccagggcaacataaatcatattactattatcatcttatgtatttaggtttgtttaatttcatctataacaatgattaataggtttgtggcgattatataaactaaatattgtaatttattaagacgctgtaattcataggtatgagtttatttttaaaatgtattatttttttctagcggatgagccgttttgttttctttaaaattaatagatatttttattggctcataacctactgatcagttggaggaattcggaatcgtcaattattttgcgattttaaaagtgtgatgagcgtcacgctaaatggaaaaaacaaaaaaacgtatttgaaggcttgagtatataaactaaccttaatcttacttccggaatactaatgaaatggcaattaatgtattcactggaaatgttgaattaattttattatctctatgtaaatattgattttttctttactttctcatgtggttcaggggctggtcttcgctaattttttttcacccataatattttcttttgttttgttgacgttttcactcttatttattcttgtaattaaaatagagattttatttttgactttaaatcttgggtcggtgttgattgccgatatcgagacgtagcaatgcagtttgttttatttttttattttacacacagcgctttatctaaagcgaaaaactaatgttggaaggatatatattatgccgaaacaaatattaattaaagtgtctcaggaatttagcgatttctgtaaaagcaataatttctcacttgctgcattccgtggagcaagtgccagtaatactaatggggttccggttgtttggtttaacgtggctaataccaatattgttccgaataatccgataaacgttacttttgatccttcttatcaggtttatgactctttggtggatcaggtaattcctgatggcagtgttaccgtagggcaatccatgtcggcgaaactaagcgacagctttggtattgtggccaaacagctaacaaaactgtccggtggtggtattcctacggggatccgtatcatcaaccaaactcccggggtgaatattgtggccggtctggcaggggataatggcgtacctattgcagcctttgtgtgtaatccgaatgttaatttattcctggagcccttacagaccgtaacgatttcgctaatcggatcagcctttggcgttggtactgcgattgttaaagcgaccgggccatcggtattattggatcttaccagcaataatgtggccaacattgaatataatgttttaatgggcgaatgggacttatctgtaggttcaccgactgtacctttaactcaaattcctgcggatacggcaatgcagccatttgtattgccaggaatgaacagtgtaaaactaaaacagttagcgtctctgaatgccgaggcagtgaaataacgtaatggatattgaaaatcactgaatacccgcttctggcgggtatttttttagggataatcttagcttaatgtaggccaatgttgtttatggcatccgcggtatccggtgctaagtgtgtaatagaacttcttttctgatgttcactccgtataatcacattctttatgttgatataccgaggtgcgcgtgacacaactctctgatttgctggaagaattacggcaccttttggatgctgactttcccgatcgggccggtgtccgacagatcgctttgccagcccctgccgtgcttggcagtcaattgctggaatggttggcaacgcagcctgtttttccgcagttttactggcgtcaccgcgatggacatgaagaggctgcggtatgtggtcaggtgcgtttattccgtgatatgtctgccgccgatgaatttatccggcaatataaaaatcatgccggattacgtatttgggggctgaatgcctttgaaccctttccggctatcgccaatgaaacagacatttcctccgctttcttttttctaccgcgattgcaattgctgcgtcgcggtggagaaattagcctgacgctcaatttagccagtgaaacctccctgcaacaggatgtttgtctggcgctggatttcatcgagcaattactcgctccgcggccaattcctgaactgacggtcagcgttgaaactcttgttcaccagcccgatcaaaaaggctggtgccaactgctggaacaggcattacgggccattgccaaccagcagatggaaaaagtggtactggcgcgcatgactcatctgaccctgcgggaaaccttattcagcccggcatttatggccgccagtcgtcaggttaatcaccagtgtttccactttatgctgcgttttgacgatcggcgggcgtttctgggctccagtccggaacgtctgtatcgccgtcagcaatcacagttggaaaccgaggcgctggcgggaaccgtggcgaatgataaggatgatgccaaagccgcgtgcttagcccattggttagccggtgacgataagaatcagcgggaaaacctgctggtggtagacgatatctgccagcgcctgcaaggcggggtttcagcggtggatgtgatgcctgccgaggtgattcgtctgcgcaaagtgcagcatttgcgccgtcggattcgggcgcaattacagccgaatgtcactgatgccgattgtctacagcgtttgcagcccacggcagcagtggcgggattgccacgtgaaccggcgcggttgtttatcctcgatgcagagccgttttctcgcggctggtacgccggttcctcaggctatttttcattggcgcaatcggaattcgcggtggcgctgcgctcggcgcaaatcgagggcgatcaggttcagatttatgctggcgctggcatcgtcgccggttctgacccattaatggaatggcaggaaatcgaaaataaatccgctggattacgcagtctgttggaaaaataagcccttagtcgataaccactaactaatagtgggtaattacccctaccgcctatgagggcggattgtggcgttgattcggcaggtgtaaactatatcgccgttattcatcggtaaaactttggcctagcgcagggcttttccttcgctgccgagtaaaaatatttatttaggctatcagcctgttaactgactgttgagcgaaccatgtcgacaagcgtctttaaccgccgttgggcggccttgctactggaggcattgacccgccacggtgtgcgtcatatctgcattgccccagggtctcgctctacgcccttaacgctggctgcggcggcgaatccgtcgctggtttgccatacccattttgatgaacgcggtttggggcatttggcgctagggctggctaaggcttcggctcagccggtggcggtgattgtcacttccggtacggcggcggccaatttgtatcccgcgctgatagaagccgggctgaccggcgagcgtctggtctttctgacggcggatcgcccgccagaactaattgactgcggcgcaaatcaggcgattcgtcagcccggtatgttcgccagccatcccaatgcgagtctcaatctgccgcgccctacgccggatattcccgcaagttggctggtttccagcctggataacgcgatggcgcagttacagcaaggggcattgcatatcaattgtccttttgccgagccattgtacggcggtgatgatagccaatatgccgaatggtccgcggcgctgggagactggtgggaacgccgcgagccttggttaaaatcctcatatcctgttagccatgccgttcagtctgattggtatttctggcgccaaaaacgcggcgttgttattgccggacgcatgagcgcagaagaaggtattcaggttgctgagtgggcgcagcaattgggctggccgctattgggggatgtgctatctcaaaccggccagccgctgccctgtgcggatttatggctagggcatccgcaggcgcaaaaactgttacagcagacgcaggtggtggtgcaattcggcagcagcctgacgggcaaacagttattgcaatggcaggctcagtgtcaaccggaagaatactggctggtggatcatttagcgggtcgcctcgatccggctaaccaccgcgggcggcggttgttagccaatatcgacgaatggttggagctacatccggcgcagccgcgagccccttgggccggagagctggctttgtggtccgacagcgccgaaggctgcgtggcagaatatctgaacgacaaatttggtgaagccacggtggcccatcgactggcggaattactgccggaaaacgggcagctttttgtcggtaatagcctgatcgtgcgtttagtagatgcgctaggccagcttcccgctggctatccggtttacagcaatcgcggcgccagcggcatcgacggcctgctttccaccgccgccggtgtgcagcgcgctaccgccaaaccgactctggctatcgtcggcgatctttctgcgctctacgatctgaacgccctggcgttactgcgccaatgctcggctccgacggtactgttagtggtgaacaataacggcggacagattttctccctgttgccaacgccggaagaagatcgccagcgcttctactgcatgccgcagaacgtcagttttgatcatgctgccgctatgtttggcctgcgatatgcctgtttgtccagttgggagaaactgcacgaagaggtgcagcaaagctggcaacagggcggtatgacgctgattgagctaaaggttccggctagtgaaggggcggaaacgttgcaatatctggcgcagcgggtggcggaactgtgacgctggcctgccgcaccgtcaattcgcacactggcacgaaaccctggctggtctggctgcacggtctgttgggcaatggcgaagattggtcagaggtagccgggcgctgtaccgaatttccctcgctgtttgtcgatcttccgggccacggcggttcggttgctcaagcgcccggtgattttgccgaggtcagccgtcagctaaatgcgacattggcggcgcaaaatattcaggattattggttgataggctactcgctgggtgggcgcattgccatgtatcacgcttgctgcggtgaacataccgggctgcgtggtttgttggtcgaagggggaaatcccggcctggaaaacgaagaactgcggcgagcgcgtctgctacgtgatacccattgggcgcagcgttttcgtcaggaacccatgacgcaggttctggctgactggtatttacagccgattttcgctgatttaaccgccagtcagcggcaagagttcatagatttgcgctcggtcaatcagggtttcacagtagctgctatgcttgaatccacctctttgggtcgccagccttatctgctgcctgcactgcaccagttggctataccttttgcctacctgtgcggtgagcgagaccttaaatttcagcaactggcgcgccagaaccggttgccgttacacacccttgccggagctggccataatgcccatcgggccaatcccgatgcttttgccgagcaggtgcgtttattcttatcactctcccgttaaaggaatgcttaatatgctgtatccgagcgaagaacaattgtacgccgccattgaatggcaggactgctcagccgggtttgaagatattcgttatcataaatcccgtgatggtatcgccaagatcaccattaaccgccctcaggtacgcaatgcgttccgtcctcagacggtcaaagagatgattcaggcgctggccgatgcccgttatgacgatcatatcggcgtgattattctgacaggcgaaggggataaagccttctgttccggtggcgatcagaaagtgcgcggtgactacggcggctatcaggataacagcggtgtgcatcatctgaatgtgctcgatttccagcgccagatccgcacctgtccaaaaccagttgtggccatggttgcaggctattccattggcggtggacatgtattgcatatgatgtgtgatttgaccatagccgcagacaacgccatttttggtcagactggcccgaaagtcggttctttcgacggcggctggggcgcggcctatatggcacgtatcgtagggcagaaaaaagcgcgtgaaatctggttcctgtgccgccagtacgatgctaaacaggcgttggacatggggctggttaacaccgtggtgcctttggccgatctggaaaaagaaaccgtacgttggtgtcgtgagatgctggaaaacagcccaatggcgctgcgctgcctcaaagcggcgctgaatgctgactgcgacggtcaggctggtctgcaagagctggcgggtaacgccaccatgctgttctacatgacagatgaaggtcaggaagggcgtaacgcgttcaacgaaaaacgccagccggacttcagcaaattcaagcgtaatccgtaatgcgtcgggcgagtttatatcgctttagtctgcctatggaggcgggcgtgattctgcgcaaccaacggctgaaaagtcgcgatgggctattggtggaattgagcgaaggtgaaaacagcggctggggggaaatctccccactgccggaattcagtcaggaaacgctggccgaagccgaagcggtgacacagcgatggttacaggcttggctgggcggagagcaaccggcggaaagtcctttgccttcagtggcttttggcctgagctgtgcgctggctgagctgaatcagacgttgccgatacaggcggattatcgtaaagccccgttgtgtaacggcgatcccgatgagctttttgacgtactgatggcgttgcccggtgacaaagtggcgaaggtcaaagttgggctatatgaagccgtgcgcgatgggatgatcgtcaacgtattgctggaagccttgccggatctcactttgcgtctggatgccaatcgaagctggacgcgtgccaaagccgacggatttgccaaatacgttaatcccggattgcgttcccgcattgcttttctggaagaaccgtgcaaaacccgcgacgaatcccgcgcttttgctcgtgaaaccggtattgccattgcttgggatgaaagcgtgcgcgaagccgattttcaggtgcaggccgagccgggcgttgcggcaatcgtgatcaaaccaacgctggttggcagtatcaaccgatgccgacaattggtgcaacaggctcatcaggcggggttggtagcggtaatcagttccagcattgaatccagtctggggttatcgcaattggctcggctcgccagttggctaacgccggatacggtgccggggttggatacgctggatctgatgcaggcgcagctattacgcccgtggccagacagtcaattgccgctgatttcgctggaacaactggatcgcatatggcgcggctaaaccagtggccatggcggcactgggcggagttgcaaccgcagaaagaggcgctgcggctggaaggtcggtctatcagttggcaacggctggtggcggatatcgacgccgtggcggccagttttcatcatcagggcgtggcggcaggccgtggcgttgcggtcagagggaaaaacagctatggcttgctgctggcctatctgggcgctttacagtgtgccgctcgcgtcctgccactcaatccgcagttacctgaaactttactgcatcagctgcttccggggctggatatcgattttattttcgattctcacgggagcgacttggctggcttagagctaacttctctgaccgacagcgcggcgtcgcctgtaacgccgcaaccttgggacgggcaacgtctagcgacgctaactctgacctcaggctcctctggtttgcccaaagcggcagcacatcaactcgatgctcatttggctagcgcggaaggggtattgagtctgatgtctttccatactgacgatagctggctgttgtcattgccgctgttccatgtttccgggcagggcattatttggcgctggcttagcgtgggtgccacgttagttattcggccaatgcagtcattatctgcagcgctggcgggatgtactcatgcgtcactggtgccgacccagctttggcgtttgttgactcaaccttcggaaaaactgagcctgacggacgtattgttaggtggcgctatgattccgactgaattgaccgagcaagccgaagcgcgtggtattcgctgctggtgcggttatggtttgacggaagcggcttccacggtgtgcgccaagcgagccaatggcaacgccggagtgggcgtggcgctttcagggcgacaggtgaggttggtggatcaggaagtgtgggtgaaaggagattgtctggccgcaggttattggcagcggggcaaattacttcctttgactgatgagaacggctggctgcacacccgcgatcgcggtcagtggtttgaggacgaactgcatattcttgggcggctggataatctgtttttcagcggtggggaagggattcagccggaagatgttgagcgcattttgctgcggcatcctcaggtttatcaggcatttattttgccggtgaacgatagcgagtttggccagcgtccggtcgcggtgatcgaaagcgatccccagctttcatggtcagaactggccgattggctagcaccgcaggtcgcgccatttcagcgcccagtggctttctatcgcttacccgatgaattgaagaatggcggaattaagatctcgcggcgttcggtgggggagtggttaaggtgatgtttttgtttgcgggtattttcgctaccggaaaccaagattgagtcgggtttcgaaagtgtaaccgttcggtttttccttaactcggttgggctgggaagtgatgtattcactaaactaatatcaaccgaaactggatgcggttttagatatgaattggctttgactttaaagcacgtatttgagctttctcacgtcaagattggagccggtttcgtaagcccagcagttcactgtctcctcacttgccgtggaggcttccgagcagggttggcgcgaaagtggggttctgcgaacgtccctcgggcgcgctttgtccggcgggtcagcgctagattcgcctgcgggcgttatcaggatgccatgccatcctggccctgcggctcaaggcgcgctttcaacagctgacggctgttcactcttggcctcatccctgctcggcccacttcctgattgcgcctgttgagtgcaaaaccagtgttcttacgaatcacaatttgcctttcgtttttgatagggcttttgaccttgagtttgatttttcagagcacatttgagcggctgagacgatgagtgagggaacctacttagtgggcaggcgatacgtgcggaggcgcggattgttaaggctcgcgcttacgagccttaactcggttgaggctgttgaggtgagatattcaccaagctaatatcaaccgaaaccagatgcggttttagatatgaacttctaccataacgctttttagccgcgcgatattagcttagccccagtgcctttttcacacctattccatagtctggatgtacttgctcaaacagcgctatctgacggcgttgaatctcttctggcacctgcgaaagttccccagcaatacgggtaaacatgcgctgatgttcttcttcgctcaacaggttaaataaggcccgtggctgactaaaatagtcatcgtcatcgcggtgattccagtgatccgccgcaccggtcagcgtcaacggtggctcgctaaaatcaggctgctcctggaataaaccgaagctgttcggctcataggtggcggtattgctgctgtttccgtccacgcgcattgcgccatcacgatgatagttgtggaacgggcatttggcgccgttaaccggaatctgatggtgattaacgcctaaacggtaacgatgcgcatcgccgtaggagaacaggcgaccttgcagcattttgtctggagagaagctaatgcccggaaccacgttggccgggttgaacgccgcttgctccacttcagagaaatagttctctgggttacggttcagttcgaaatatccgacgtcaatcagcggatagtcaccgtgtggccaaactttggttaaatcgaacggattgtacggaacttccgaggcttcgtgctccggcataatctgcacttgcagagtccaacgagggaaatcaccgcgctcaatggcttcgtacaaatcgcgctgagaactttcccgatcggaaccgatcagtttttccgcttcatcatccatcaggttttcaatgccctgctggcaacggaaatggaatttcacccaataacgctcgttctgattgttgataaagctaaaggtgtggctgccgaaaccgtgcatatgacggtaggattttggtaggccgcgatcgctgaaatcgatagttaactggtgaagtgattcaggaagctgagagaagaaatcccatttgtaggttgggttacgcaagttggttcgcggatcgcgtttgaccacatggttcaaatccgggaatttcaacgggtcgcgcagataaaacaccggcgtatcgttgcccactaagtcccagttaccttcttcggtataaaacttcatggcaaaaccgcgaatatcccgctctgcgtcagcagcgccgcgttcaccggctaccgttgaaaaacgcacgaacatatcggttttcttaccgatctgagagaaaatcttagcgcgagtatacttggttatatcgtgagtaacggtaaaggtaccgtaagcgccagagcctttggcgtgcatccggcgctcagggatcacttcccgatcaaagtgagctaatttctcaagaaaccagacatcttgcagtaacatcgggccgcgagggcctgcggtcaccacgttattgttgtcgacaacgggtgcgcctgctgccgtagttagtcctttctttttgctcatcatgttctccagtatcgctgttgaattgactgcgggtgttgaaatgagtctgagtgagagactctgttaaaaattggacttattgccagatgacaaagaatgactttagcgaatcgccgctgactgttctttgatccccccactagttgtagctgtataggtcaccttcggcaaatagatataggttatcgctgggattaaatctacggcggaacgattcatcgcatttagttacaatcatatgaaatgatgagttatttattcggttttttctggcttgttatgggaagcttttcggttaaactcatggcgggaaagctctgtcggcaagttgcgcggcagataattgaataataacgagagattatatgagaaagacacttattgcctgtgcagcaagtttgctgtttgtagcaggttcagccagcgcgatcagcgtcaccgcagaagcaggacgtcattacactaacctcggtgtcggtatgggcaccaacagcggcggcctggctgtgagcggtaactgggcgcgtagcgaccacgacggtgacatgggcagcttaggtctgggcttcaacctgccaattggcccattgatggcgaccattggcggtaaaggtatctatatggcacctgaagacggtaaaaacggcggcgcaattgccgttggcggcgggttgagctatccgataaccaaatcattcactttatacggtgaaggttatgtagcgccagaatccctgaccagtgggatgaaatcctacaccgaagcgaacgccggtgtgcgttggagcgtgattcgcccgttgacggtagatgttggttatcgttacatcaatatggaagggaaagaaggccgtcgggataaccgtctggcggatggcatgtatatcggtgccggtctaaacttctgatttcatgcgttgaaaacaaaacgggcgctgggtgtgatacccgcgcccatttttttatgtagagatactcggtttctatgtggagatactaggtataaaacctgttatttcagtgtattaacccactgcgggtaataccccggcgacaataccgacctgaatcgcaatcacggttacaccgcaggtaaataccagtgccagagctggtttaccgccccaaacacgatagtttttaccctgatgcatctggcgcgctttccaggccagtaacgaaggcaaaatcagcgccagcaccgatagggcaacggcggcaaagcccagcgccatgacaaatccgcgtgggtaaaacagggcgaacagcagcggtggtaggaaggttattacgccggtttgcagtcgaccgcgcaccgtattacgacgcttaaataaatctgccagataatcgaataaccctaaggctacgccgaggaatgaggtcgccagcgccaggtcggcaaacaggtgtaccgccagttcaacgtgtggtgaggcgacgacttcacgcacggcctgtaataaaccgttcagaccggcctgctgcgccagaataccgacaaaggtatgagaagaaatcgcgcccagcgtcgctaattgccagaaaatataagcgattaatggaatggcgctgccgatgataaacacccagcgcagtttgcgaatattaccgcccatataattgacgatacttggtacgctgccgtggaagccgaaagaggtgaaaatcaccggaatggcagacagcgccagcccttgctccaagggtaaggtcagcaggttggctttttccacgtgcggcatcattaatgccagcattaccacgaggaaaataattttcgcgctgaataaaattcggttaaataaatcgactgaatgggtgccaatgcacacaactccaccggctatcaacgtgaatagcagtacgccgagataggtcgggaagctctgctctgtccattggctgatactggttgccaaaagctcaccggcgccgctgatataggcagaggtcaaggcgtacatcaaaaacatcatgctaaagccggttaaccactgaccacggctgcctagatagcgtttggccaaagtgcccagaccggtatcagccgcttcgtgttgatatacttcaaccaataataatgcggtgtagcacatcaatagccaaagggagaccagaagggtcaaggttacgctgaaacccacgccagcggcagcaagcggcatcgccagcatccctgcaccaattgtggttcccgccacgataaaaatactgccaagagtgcgattcttcacgctttcctctgctaaccgacattttattgaaattattgagtgcagcagagtagatgatcccattaattctgtcaaatcgacgttacaactgatgtaaaattatgtttacactcggttgttgtttgatttatcaggttttattttaaagttgttgcgggcgcggtggaaagagtagaaaagattgtgtttcaccgaggctgttcttaaagtgtgagtaagggaatttgcggagagaaaaatgctgagaattgagatgttaagcaccggcgatgaagtattgcacgggcaaatcgtggacaccaacgccgcctggttggcggactatctgtttactcaaggattgccgatgagcagccgggaaacggtaggtgacgatttggaagcgctcatcgccgtactgctagaacgcagccatgtagccgatgttctgatcgtcaacggcgggttggggccgaccagcgacgatttaagcgcgatggcggcagcacgagcctgcggggtggaactgatcgaacatccacagtggattgcccgtatggaagcgtttttcgccgagcgcggaagagtgatgtccgccactaatcgcaaacaggcacacataccggccaacgctgaaatgctggataaccccgtgggaactgcctgcggttttgcgttccaactgaataaatgtcagatgtttttcactccgggcgtgccttctgaattcaaagtgatggtggagcagcagattgtgccgcgtttacgggaaagttttccgcagattgcgccaccgctttgtttacgtatgaccacttttggccgttcggaaagcgatttggcgatggagctagacccgctgccgctgccggaaggcgcggtgctaggttatcgttcttccgcccctattattgagctgaaactgaccggcccggcttcacagcgttcggcgatggaagaagtctggcagcaggtgcgtcaggtggccggtgaaagcctgatttatgaaggcacagagggattacccgcgttggttgccgggcagttgaatcagcgcggattaacgctggcgctcagtgagcaatttaccggcgggctgatcaatttacagctacaaagcgtgcaggcacctttagccggtggggaattgctgccgttatcctgtgtggaaactttgcctgagcttgccgcccgcgctcagtcgttggctgccctgtgcggtgcgccgttggtattggcggttagcgcaatgaaaggtgaaaatcttagcgtagccttacatacgccaaacggtactttcggacagacggttcgctctcaggccagccgtcacgggttaagaattcgacaggaaacgagcgcgatgctcggcctggaaatgctgcgtcgctggctggcaggaggcaaagtctgcggtcagcacggctggctgacggtgattgaaatgctgtgatatcacggcgcaaataaaaaagcagacagtgccatcactctgtctgctttttatctatttcgtcgatttttattgccgccgcggattatttttcctgcgcgctgtgtacttctttactggcttcccacagacgatatttcacttccacgccttgaggcacgtataccacgattggcaggcggctgttataacgctgcatggtattgttacccagattggcggtaacaaatgccggatgtttagcgctttctggacaggccatctgggttgataaaactccggagatttcattcattaccagatagtcgtaaccccagccatccagagtatgggattctaacttgccgcccaacatatggtggttacagtcaatttccagatttttgccaatcaacaattcaactttaaagcgatcttcatctggccgctgcggcagataaataacctggcggctcatacctgtttcagcggctgggaagggcgcgattttttccagcggctgctgttctggtgccgtattgtctgcggcgatagctccggcggaggcggcaagcagtaaaccggcgatcagggaaaatgttttattcatattgatttctccttgcgattaatgccgataattttaacacaaaagtatcataaggttagtatatgcaattggctataatcatattattcatagatgattatagccctgattttttgttaaaatgctgaatataattttacaatgctcgttttataaaatgaaaaactaaattttgtcttattatacctcctcatagtacaaggtatgtatgtgcccaatgattccaagggtacgtgattccatatttctattcattattgttaatgaatgaatattttttatatattgatttactgtaattgtaataaggagaggctatgaatgttggtatgacatcaggcgtttatcagattaataattcaatggaaaacgtcgctgaaattaaacgtggttctcagttcactcattcgttggctaaacttttaactaaagtaaaaaatgtctacatttcacttgttacctcggtgaggtcatcagcagtatcgaaaggggaagataaaacttcccctgaagtgaaatcagaaggacggttacaaaaattgctaaccggaattaaacaattatttggctctttatccacatcctttaatatcgacaaatcaaaatcatcagcagcgagttttacgttacacagtctatttgatattaaggaggtagagcgcggcgatgggattgaaaaactttgtaaaaaaataaaagagactgcaaagcatgaagatattcttactatgtttaggacgtcaccgtcgagcgatgatgcacaagaaataaaacaaaaaaggtttggcttcgaacaattttgttcaagtcagaattgtactcctgaggttttgtcctcaattttcaaaaaagagatgagtcatcttttgcctaaattagataataatgattttaagcgtcttcctgatattcatcccgaaaataaacaaacgcttgatgattgcaaaaacgcggtacggaatgtcttgatagagaaaattaatcagatgcctgcggataaaataaaacttgtggttatgatgctcaatacgctagcagaagttaaaaaagtggcaatagataaagaggaccatactctaagagacatcaatggacttaaccgctatgtgattccccatttgattggtgatgatcttgaatctcgctatttagaaaaaatacccggtaccaataagatgatgaaagatgatattgaagctaagttaactacgccatttaatcactggcaacatctatctatagcgcaatctggttacgtacaggtatttaactgagataaaagttgggtggtgatatgtttaataaaaaaccgcgctaggggcgcggtcatcagtagtttactttgttttatctgtctgcctgaaaaagtgcgttgcagactaaatttccagctcaatatcacccaccggttggcagcagcaggggagaatttccccgtcttgtacaaaggccagcggttgctgggcgtagcaaacttcgccttttagcaaacggatacgacaagaaccgcaatagcccgagcggcattggtattcgacctgaatctgatgctgctccagcacttccaacaggttggattcattatcgggatagggcaactgcgtacctgaagtacgcagattgataatagatttttccatgcaattaaagctggaaatcactcaaatcgtcggcgctgacttcggaatcaatctgaccgaccagataggagctaacttccacttcctgcggggcaacctgcacgttgtctgacactaaccaggagttaatccatggaatcgggttggtgcgggttttaaacggaatgcctaaacctacggcctgcatacggatattggtgatgtattccacgtattggcacagaatatctttattcaggccgatcatcgaaccgtcgcggaacaggtattctgcccattctttttcttgctgcgcggctagtacgaataggtcgtaacactgttgctgacattcttcggcaatttcagccatttccggatcgtctgcaccggagcgcatcaggttaagaatatgttgagtgccggtcagatgcagagcttcgtcgcgggcaatcattttgatgatcttggcattgccttccatcagttcgcgctcggcgaaggcgaaagaacaggcgaagctaacgtagaagcgaatcgcttccagcgcattgacgctcatcaggcacagatacagctgctttttcagctcgcgcaggttaacgaccacggttttaccgttgacctgatgggtgccttcccccagtaaatggtaatagctggtcatttcaatcagatcatcgtaataagccgaaatatctttagcgcgtttcagaatttcttcatttgtcacgatatcgtcaaataccaccgccggatcgttcacgatattgcgaataatatgggtgtaagaacgagagtgaatcgtttccgagaacgaccaggtttctacccaggtttccagttcaggaatggaaatcagcggcaataaagccacgttcgggctacgaccttgaatggaatccagcagcgtttgatatttcagattgctgataaaaatgtgtttttcgtgttccggcaacgcgttgtaatcgatgcgatcgcgggaaacgtcaatttcttcagggcgccagaagaaagaaagttgcttttcaatcagcttctcgaaaattgggtgtttctgttggtcgaaacgtgccacgttaacggactgaccaagaaacatgggttcgagtaactggttgtttttgttctgagaaaaagtggtataggccatgatgtcctcgaggatatcgcaaaaggcaaaaagaaatggccctcaggatgactcgatttttgcgcggccgaaacggcagggcgcaaaatgatcaaccgccagccaatcgctgaatggattgtccggcgggagggccttaactaaaaatcaaatcttacacgcaccgccttcgcagtcgtcgtctccgggctgaccctgaatgtcttcctgcacatcgtcagccccgtcgcgggtgttttgataatacagtgtcttcacaccaaatttataggtggtcagcaggtcttttagcaattgcttcatcggcactttgcctgatgggaaacgggccggatcgtaattggtattagctgaaatggcctgatcgacgaatttctgcattaaaccgaccaattgcaggtagccatcgttatttggcatttcccacagcagttcgtaagcctctttcaggcgttcatactcaggaacaacctgacgcaaaataccgtctttcgaggctttgatactgacatagccgcgcggtggctcaataccgttggtggcattggagatctgcgaagaagtttctgatggcatcagggcagacagcgtggagttacgcaggccgaattcctgaatatctttacgcagcgtttcccaatcgtagtgcagtggctcatcgctgatcgcgtccaaatctttcttataggtatcgatcggcagaataccttgagaataagtggtttcgttaaaccactggcatgcgccttgctcacgcgctaactgattagacgctttcagcaggtaatactgaatggcttcaaaggtacggtgagtcaggttatttgcgctgccatcggagtaacgcacgccgtttttcgccagatagtaagcgtagttaatcacgccgacgcccagagtacgacgacccatagcgccacggcgagccgcttcgatcgggtaatcctgatagtccaacaaggcatccagcgcgcgaacggccagaatagccaggtcttctaattcatccaggctatcaattgcgccgaggttgaaggcagacagcgtacaaagcgcaatttcaccgttcggatcgttgatgtcgttcagcggtttggtcggcagcgcgatttccaggcacaggttggactggcgtaccggcgcaatcttcggatcaaacgggctgtgggtgttgcaatggtcaacgttctgaatgtagatgcggccagttgatgcacgttcctgcatcatcagggagaacagttccaccgctttgacgcgttgctgacggatgctgctgtcctgctcgtactgggtatacagacgttcgaatgcttcctgatcggcgaagaaggcgtcatacagccccggtacgtcggacgggctgaataaagtgatgtcgccgccttgcagcagacgttgatacatcagcttgttgatttgtacgccgtaatccatgtggcgaacgcggtttccttccaccccacggttatttttcaacaccagcaggctttcaacttccagatgccacatcgggtagaacagggtggctgcgccgccgcgaacgccgccctgcgagcaggatttcaccgcggtctggaaatgcttgtagaacggaatacagccggtgtggaaagcttcgccgccgcgaattgggctacccagcgcacggatacgaccggcgttgataccgataccggcgcgttgagaaacgtatttcacaatggcgctagaagtggcgttgatagaatccaggctgtcgccgcactcgatcagtacgcaagagctgaactgacgggtaggagtacgtacgccggacataatcggcgtcggcagtgaaatcttgaaggtggacactgcatcatagaaacgcttgatgtaatccatgcgggtatcacgcgggtagccggagaacaggcaggccgcaaccaggatatacaggaattgggcgctttcgtagatttcaccggtaacgcggttctgtaccagatatttcccttccaactgcttaaccgcagcgtaggagaagttcatatcgcgccagtggtcaataaaaccgtccatctgctcgaagtcttcagcggtgtagtcttccagcagatgcttatcgtatttgcccatgtcgaccattttgctgacgtggtcaaacagttttggcggctcaaactggccgtaggcttttttacgcagatggaaaatcgctagacgcgcggccagatattggtaatccggtgcgtcacgggagatcaaatccgctgcggctttgataatagtttcatggatatcggcggttttgatgccatcataaaactggatgtgagaacgtaattctacttgagatactgagacgttatgtaaaccttccgcggcccagtcgatgactcggtggattttatcaaggttgatgcgctctttgctgccatcgcgtttagtaacaagtagactttggttcatgtgttcttgaccttttttcccctgttcagcctacataaaacacaagtctatgctctccttgattgcagtaatcattgagggcagtagtgcattgttcagtatgtaaacactatatgtgggggtagtatgttggtgagataacaagatagtgagaaacgacgattttagcaagtgaacaaaaccgacgaattgtgtggataacttgggggtgaaatgttaccaacggcttacaacctgcgtcagcactggagatcttgctccctcagtctgggggataagattttaccgaaaatcttaaaaatttgattgtttgacgctttattaaacgttagaaaaaaacgcgataaggtctctgttttaatgtcaaaaaaagcggcttggatcgcatttttctgttgacggcgcataaatcaacgtatttcggatagaagctgatcaatctgataaaaattcgggcgacgcgcagttggccgccatcgcccttaaagctatgaactattcaacgctacccattaagactctcttgatccctttgggtgtgcagcatgtagttgacgtctacgttgcgaccgagcttaaagtgatcggtcagaggattataatgcaggccaataatttgcttttctcgtagcggagtttggtcgatccaaccgatcaattctgacggacgaatgaattttttcgagtcgtgagtgcctttcggtaccattttcaaaatgtattcagcgccaactaccgccatcagccaggatttggtattgcggttaatggtagagaagaatacgtggccgccgggtttaaccaaacgggcgcaggcgcgaatcaccgaagccggatctggaacgtgctcaagcatctccatgcaggtcactacatcgtactgctgcggatgcgcttcagcgtgagactcgacggtttcttgtacgtaatcgagcttgacgccggtttccaaggcgtgcaaacgagccacttgcagcggctcggtgcccatatccagcccggtgactactgcgccttcccgcgccatactttccgccaaaatgccgccgccgcagccgacatccagaactttcttaccgaaaataccgtctgcgcgttgcaaaatatagttcagtcgcaacggatttatccgatgaaggggtttgaattcaccttctaaatcccaccaacgggaggcgacggcctcgaacttggcgatctcgctttcatcaacgttagggcggtttgctggggtttctgcacgcatggctgaatatcactcctctatctctttgcgcggattatacatgctccccgcagattggcgcagttttgtatcgtcagcctaagtttcatcggaagcttgtggaacaggaattcgaggataaacttggcatattcacgtctgtagtttccccaaaatctgcggtttgtgatatagtttcgtacctttgaatccggtaattagtagagggatagcggctcaatgagcgaccttgccagagaaataacaccggtcaacatcgaagaagagttgaaaaactcctatttggattatgcgatgtccgtgattgtgggacgtgcgctaccagatgttcgagatggattgaagccggtacaccgtcgcgttctgtttgcgatgaatgtactgggtaacgactggaataaaccatacaaaaaatcggcccgtgtagttggggacgttatcggtaaatatcacccgcatggtgacagcgcggtctacgacacaattgtgcgtatggctcagccgttctcactgcgctatatgctggtggatgggcagggcaacttcggttccgttgacggcgactccgccgcggcgatgcgttataccgaagtgcgcatgtcaaaaattgctcacgaactgctgtcggatctggaaaaagataccgtcgattacgtgcctaactacgatggcaccgagcagattcctgccgtcatgccaactcgcataccgaacctgctggtcaacggcgcgtcgggtattgccgtcggtatggcaaccaacattccgccgcataacctttctgaggttatcgatggctgtctggcgtatatcgaagatgaaaacatcaccattgaagggttgatggaacacatcccagggccagatttcccaacgggcgccattatcaatggtcgccgtggtattgaagaagcttatcgtactggccgtggcaaagtgtatgtccgcgcccgtgctgaagtggaagctgatgctaaaaccggtcgcgaaaccatcattgttcacgagattccgtatcaggtgaacaaagcgcggctgattgaaaaaatcgccgagctggtgaaagagaaacgcgtcgaaggcattagtgcgctgcgcgacgagtctgataaagacggtatgcgcatcgttatcgaagtgaaacgcgacgcggttggggaagtggttcttaacaacctgtattctctgactcaattgcaggtcactttcggtatgaacatggttgccttgtctcagggccagccaaaattactgaatctgaaagatattctggtggcattcgtgcgtcaccgccgcgaagtggttacacgccggactatctttgaactgcgtaaagcccgcgaccgtgctcatatcctggaagcgctggcgattgcactggctaacatcgatccgattatcgaactgattcgccgtgcggcaacgcctgccgaagcaaaagccggtttaattgccaatccgtgggaactgggtaacgttgcttccatgctggaacgtgctggcgatgatgctgcgcgcccggaatggttggaaccagagtttggtatccgcgacggcaaatattacctcaccgagcaacaggctcaggcgattctggatctgcgtttgcagaaactgaccggtctggagcatgagaaactgctggatgagtataaagaactgctgactttgatcgctgagctgatctttattctggaaaacccagagcgcttgatggaagtgattcgcgaagaattagtggcgatcaaagaacagtacagtgacgcacgtcgcactgaaattaccgctaatacttccgatatcaacatcgaagacctgatcagtcaggaagacgtggttgtgacgctatcccatcagggttacgtcaaataccagccgctttctgattacgaagcgcagcgtcgcggcggtaaaggtaaatcagcagcccgtatcaaagaagaagacttcatcgatcgcctgctggttgccaatacccacgacactattctgtgcttctccagccgtggtcgtctgtactggatgaaggtgtaccaattgccagaagccagccgcggtgctcgtggtcgcccaatcgttaacctgctgccgttagagccgaatgagcgtattaccgctattctgccggtgcgggaatacgaagaagggcgtcacgtctttatggcaaccgccagcggtaccgtgaagaaaactgcgctgaccgaattcagccgccctcgcagcgccggcattattgccgtcaatctgaacgaaggcgatgagctgatcggcgtcgatctgaccgatggtagcaacgaagtcatgttgttctccaccgaaggtaaagtggttcgtttcccagaagaacaggttcgttcgatgggtcgaaccgcgaccggcgtgcgcgggattaacctgaatggcgatgaccgcgtcgtgtcactgattatccctcggggtgacggtgagattctgacggtgacagagaacggctacggtaaacgtactgcggtagaagaatatcctaccaagtctcgtgcaacgcagggcgttatctccatcaaagtcagtgagcgtaatggtaaagtggtcggtgcggttcaggttgcgccaactgaccaaatcatgatgatcaccgatgccggtactttggtgcgtactcgcgtttcagaagtcagcattgtgggccgtaatacccagggtgtgacgctgattcgtactgctgaagacgagcacgttgtcggcctgcaacgagttgcagagccagaagacgacgatgaggatgaagcacttgaaggtgaagaaggcagcgcagagaactctgagctgccagcagcaccggaagatgatgccaccgacgcgccggaagacgacaacgcataatgttaaaacaggtgcggaaaatcgcgcctgttattgactgctgtgatgaaaagacaagccagcctcagtgctggcttttttatgtgttatcggtagtgtattctgttagcagaactgcccatccggcaacgttttcaccatggtatccgattgaaatatctttcttcttttcgaacaacgctaaaaatatcccgctatttattccgggtacttgccgttatgctgtggtcgctaggcgcactgctgaccaccttctatatcctgaatattctgaatgagaaaaaatcggatattcgtcaggaatataataccaatttcgaacaggcgcagaattacatccggcattctgctgatattatccgtgatatcagatatatggcggaaaatcgcctcagcgagctcagtaattccgtcgagatacgcagcaatggcatggcgcataaagccggtgagccaaaatattatccgcttaatgtcaacgctgaatgtggcgatctgcgttcttcgtaccattcttcgctggaatcgctgagcgatctgattctgtactggaaagagaactttgccgctgcgtacgaccttaaccggatctttttcgttggcgctgaaagccgctgtctggttgatttcaatatacgtaatacgccgttggatcagaaaaacctgctttccgctctgcatgaacatatgcagaaatatatggatgcgaaaaatcaggataaagacaacactctgtattttgtggtgcccggcgcgcgctcagataccggttatctttatgtgctaacgccggtgtttattggcaataagctggaagcgttgattggtactgagcagacgattcgtctggaggactttatctcagcgggaaccttgccgattggcgttactttgctcgatcagaataatgagccggtgcttcgtctggctaccggcgaacgctatgcctctatgctggatgaatatccggactcaccctcctattttggctatgcagatgattataacgacctgatcctaaagaagaatttactgccttcatcgcttagcattgcttattcattgccggtgaaaaccgtggttgaacgttttaagatgttgatttttaacgcgctgctactcaatgctttgtctgcggttgtgatttttactttagcctgggtatttgaacgcaaaatgttccgcccggcagaaaataacgcttcgcagctggaagaacacgagcaatttaaccggaaaatcgtagcttccgcgccggtggggatcagcattttgcggctcagcgatgggactaatatcctgagtaatgagttggctcataactatattaatttgctgaccaacgaagaccgggaacgcattacgcgaattatctgcgatcagcaggctaattttgtcgatgtgatgaccagtaataacaataatttgcaaatcagcttcgtccattcccgctatcgtaatgaagacgtggcgatctgtgtactggtggacgtcagttcgcgggtcaaaatggaagagtcgttacaggaaatggccgccgccgccgagcaggctagccagtccaagtccatgtttttggctacggttagccacgaattgcgcacgccgctgtatggcattatcggcaacttggatttactacaaaccaaggagctgccgccgggcgtggaccgcttggtcacggcgatgaataactcttccggtttactgctgaaaatcatcagcgatattttggatttctccaaaatcgagtcagaacagctaaaaatcgagcctcagcccttctcctgcgtggaagtgattactcatattactgcgaactatttgccgctggtggtgaaaaaacggcttggcctgtactgctttattgagcctaacgttccggtcatgatgaacggcgatccggtgcgtttacagcaggtcatatccaacttattgaataacgccattaaattcaccgataccggctgcattattgtgcaggtcaggctgcacggtctgtatttggaattccgcgtacaggataccggcgttggtattaatgcgaaagaaatcaatcagttatttgaccccttctttcaggtcggtactggcgtacagcgccacttccagggaacggggttggggctggcgatctgcgaaaagctgatcaatatgatggatggcgatgttgaggtgaattccgaaccgggtatcggcagcgtattttcaatccgaattccgctatataacgcgacgttaccgacgcctccgactggcaaatgctggaaggggaagactttgctgatggaagtgcggaacgcccgcctcgaatcttatctgaccagcctgttttgcagttacggcgcagatattcagcgttacaacggtcaggcaacccgtggggatgaggtgctgattaccgattacattccgcaagtcgccacgccgctgttggcgcgaattcatttttctatcgaacatataggtttaccgcaggaaacccggccaggctactgggtggtcagcacttcaacgctgctggaagccgttcctctgttgcatcgaattttgctggatgtatcgattatgacgtccacgccgctgcaattaccggtgccggataaagataatcaggtagataatagcgatatgcgtattctggtggtagatgaccatccgataaaccgtcgtttattagctgaccagctaacgtccttaggttatcaggtgcttacggctaatgacggcattgatgcattgacggtattgggtagcaatcctattgatatcgtgttgacagatgtcaatatgccaaatatggatggttatcgcctgacccaatgtttgcgcgaacaggagctgcatttcccagtgattggtgtaacggctaatgcgctggcggaagagaagcaacgctgtctggatgcgggaatggatgactgtctgtctaagccggtgacgctggatacgctgcgacaaatgcttaatcactacagtgaaaaggtgcggcaggggcggtgagtggatttgaaataataaacccgacgcgagaaagccgggtttattggtaggaaaaccgctttattaccctttatattactctttatcaacctggctgatgctgacggaagacaggtaatttagcagggcaatatcgttatccacacccagtttcagcatggctgattttttctggctactgatggttttgatgctgcggttcagtttccgggcgatctctgtcaccaggaagccttcggcaaacaggcgcaacacttcgctttcttttggagaaagacgtttgtcgccgtagccgttagcgctgattttttccaacagtttagccacgctttccggggtgaattttttccctttctgcaatgcggccaaggctttgggtaaatcggtcggcgcaccttgtttgagcacaatcccatcgatatccagatccaaaacggtgctgagaatcgccgggttattattcatggtcaaaacaataatggccagatgcggaaaatgacgcttgatatatttgatcaacgtaatcccgtcaccgtacttgtctccaggcatggagaggtcggtaatcagaacgttggcatcaagttttgacaagctgtttatcagtgcagtggagtcttcaaactcaccgactacatttacccattcaatttgttctagtgatttccgaatgccaaacaaaacgattggatggtcatctgcaataattacattaaggttgttcatgttatgggttaccttgctgcaacagcctactgacgaacgaatcaatctggctgatgctagtttcgatcttcaactgatcgccgtttgcgatatgctgttctaatgtttcacacagttgcttgccgagaaccagattcaacatagcaaacacgcctttcaatcggtgcgcggtctgcgagagcgatataaaatcacgttgctgggcctcagtatacagtttcttcaaatctaccggtactgtctcaacaaacagcgcataatagtcactagattttaactgttgctcatatccggaaatatcatcctcgacagggttttcttccgctgtttccacgctatgagcggactcataggaagaaatctgctgctctatcagtaacagaatggcgtctatcaccgcgctgccaaggttgtagttaacccgaatatagttctgttgcaactgttgtaaacccggctcgtctgaagtcagtaagagggtataaggcgcatagttttgcgggttatccgttaacattacgtcatactccctgcccggcagacgatcgtctgcaataatacaatttgcaccgaacgcattcagtagcgtagtcacgatggatttcacttcatctgaagtaatatccagcatcacggttacgccatctagtaatttctcctcttcatcttcttgattttcgtgcaatcccatagcaacgcggacggtgtaacgggtaccgatgtccactttactgcggatttccagctgcccgttcatttttttgcataactgattgcacaaaaagaacgtcagaccagagccctgactatagcgatcaaccagcgtttggcttaggaacggatagctgagattactgatttcttcgtctgaaataccggcaccggtatccacaatctgaatagtcagtaactctggatgctcaggttcatgtttcaccgttaaggtaattttaccgtagctggtggtcacaatggcatagttcagcaacaacgctagcactttacgcaatgcacgttcatcaccgatataggttttgtctacatctgccaaataatggttgaataaactcaatccttttcggtttatggacggcaaagcttgcagcaatagctcatcgatcagtctggatagcgagaaattctgctgttccggttgccaatcctgcgtttccagacgggtgagcagagtgatgttatcgatgagcgttagcacgctatctgaatgctgaaccaactcgttgactagagactcacgtaactctggatcggtgtccggatgctgtagcaaccggtgcgctagctgatttaacatgctaaccggttgattcagctcgatgcccagattatgcaacatcagcttccgcgcctgtagattcttatcgtattcgcgccgcgccatttgcagttttttgttcaccagtacttctttatcctgatcgtgcagcaggaaaaggtaagtttttggggataatcgactgcggaacattcgtatttcatatacttcgttgttaaccgttccctgaatgaccccgtgatgctgttctgccatatgggcaattttttgcaaattaagatgaggcagcaagtgctcggcaattttgttgctggccaccagcttactggtcgcaaagttatataccagtaatcctaaaggcaggctggcaataatttcctgattcagagacttctgtgcttccaattgctcggccatatcttcaccggggcgaacatactgatggcgaatcaaatagatgcacagcagcgtcaggccgaataagaacagattagttaagatcagccaggaattattgcgcgccagatcgagggccagaccggtcaagggaacgcgatacactactttgagcgaggcattggccagcggagcggcaaactccagccatgaaccgttaatggctaccgaggcggtagccaaatcttccggagccatcccgccatcgccaattggcgtgttgtccggctggagcaggaagctggagcgcgccatattgactggaatcagatcgttaatcggcaaatcaaaggcgataaccgtcgccagatggccgggatggttgaaggtggttctgagcgtaaaataataggcattttgaaaacgctgtttacgtaacggagaaaaactttcccgctcatccagcgtattggcctgttgcagcatttccgcccggcgagactcagcggacgctgtcaggtaggtttccttaaagcgggtggtgagctcttttagcgactgagtcgtaatcagaatcaggctgttatcctgcccgttcaggtagtacatggaaaaggtgtcgctctgtgaaccccagcggctatccagatagtttgacatacgcaaagtcatgcccagcgtggctctatcatgattaccgaaaatcaccgcatcagttttagctctgggtttttcaatgaaataaacatcaggccgcaggcgggtttcttctacacccgcgggtagcacctcatcggcatcattgtaggcgggattggtcgccaactcgtaaatctgataggtattgtagcgataatcatcaatacgctgctgcaagctggtagcgatattattcagagcaaactttttttctgccagatatgcgttggtatagttgtagccgtagagacccacggcgatcagcaatagcaggataaacagccaaaaacagcgggcgatattggtcaggctaagaggtaacgaattattttgcatagggataacgctgattccttgattaacgcgttactgtccgggcgctggccgttacgctgagtaacagaaccgctacgcacccgaaggcaaagggcaaactactgagctgtgcgataaaacctatcagcgcaggacctgccagaataccggcgtagccaatggttgtcattgaggcaatggctaaattcgttggcataacccgctgattgcccgcagcggtaaacagaatcggtaccacgttcgaagcccccaacccgaccagcataaaaccagccatagttgccgtaggattatcaaagctgatagcaataataaaaccggcggcggcaaataggctaccgcccaataatacggcatagcggcctagtttattcacgatacgatcgccgttcaaacgccccatcgtcatagcgatggcaaaaatagcgtagcccatgccggcctgagaaggttcgataccgcgtaagctagtgagaaacaatgcgctccagtccaacattgaaccttcagccaaaaacatcacgaaacacaggaaaccgagaaacatcacccagcctttagggcgtacaaacagcgggccatcgtgtggttctccgctgcctgccagcaggtttctgttcgccatcgccagcaaggcaataatgactattacggtaatcaacaccgcgactaaaggagagagacctagccacagtagcgcactgactccgccagcaccggcgataccgccaacgctgaacaggccgtggaatcctgacatcatggcgcgaccgctggccttttcgacaatcaccgcctgaatattcattgctacatcaattaccccgatagcagccccaaatagcagcaatgccacggccatgctgatgggagtatccatcagtaccagcagcggtaaatccagacacaaaagggcaccggcaatcaaaataacccggcgacagccccatttcgccgtcattacgccggtcaacggcatagccagcagggatccaacgccaatacacagtagcagtaaccctaatgacgcatcattaagagcaattctggctttggcgaaggggactagcggcgcccaggcggccattgccaaaccggcaataaaaaaggccaggcgggtagcgatctgttgaggaacgccgggcagttcgtgttgttgctctatttgggtgctcatgttgattttggcttgtcgtgagggtgaataactaaaattgagacttgtttctatcacaaagcgaaatccgggtcgaagatattcacggcttcggacggattaatcgtgggttagcgtgctgggttgataaggtctgggtcgtttcattgggggtaattcagcctgttattattttctctggattttttaatgattaaaaaaatttaataatatggtttggcggtgattcttccagtgattatctatttttatcatataaaaaaattcatacacatcgtcagggacaaaaaaaccataaaacaacgataggtcaattggcgaactgcttgattaaatgtaaagccattgcaattagttagttaactttttgtcaccccgaatgaccctttaaggttcgccccgtcattgattcccctactttttatcatgattagtattcactcaaataatgaaaatatttttgtacaagcgttgaaatatctacttatatctaagtattagcttttgaagtaactacgcaaaattttaacaaaataaatgtatttatcgtgccttggttcatttttacgttgtcatcaacaccgaaaacaagcttaaacccagattaacaaggtttactttactctcctgcgtctgactacccgccctggggtggttttacgtggaggtcgcgtcctgcttgctttgtgaggttacctatggcgaacaccgctgccggctcagttgatatcatttcccgcctaaatggcaaacaaatcacccatgttgccagtggcaatcaaattgtggtgcttaatgaacccagcgtggtgcgtatccatgcggctacggatagcgttgttcgctatgagcgtcaaggtaacgatctgattttacatatgaaagatggtagcaccgtacgctatcaacactttttcaaggcagatgcagaaggccactacagtgagctggtgtttgatgacggcttgcatcaaccggtctatgccgtcttccctccgacgctgttggccgcagggggcgaaaccgttgctctggtgccggaatttgccgccatcgatgggctatccagcctggtcttaagcgacggtattgcctccaatgctgtgctggctggcgttttaggctttctggccatcggtgccgggattggtatcgcagcgggtagcagcagcggtggtggcagcggcggcggtaatcccaatacgccgactttgacggtaaatccgttgaccggtgacaaccgtttgaacgcgaacgaaacccatgcatcacaggtattgagcggcgagacaacctttattgctgcgggtcagacagttacattgattttgaacggcgtaacctataccaccaccgtcggtgccgatggtaaatggagtttcaatctgcccgcttcggtactagagggtctgcaagacggccgctatagcgtgattgtcaaagtgaccacgccaggcggacagacgctggaaaaagatttcacgctggaagtggataccgttgcgccagcgctcacggtttcacctttggctggcgacggtattctggaaggcgcggaactgactcagccgctggtggtgaatggtaccgcgtcggctggagatgcaggacaaaccgtaaccgttggctttaacggacagacatataccaccacggtaggatctgatggcagctggagcgtgacaattccgccttcggccttgaccggtatcagcgtgggttctcatccggtcacggtgaccgtttccgatgcggcgggcaatactaccacggtaactcaacccttgaccgtcgcgggcaatgcttcgctgactatcggcgattttgcggtgaataatattctggatggagcggaacagcagcttaatcaaaccattagtggcagtaccaaaggcattaccaccgggcaaactgtaactgtaactttgaatggtaaaacctacaccgcaaccgtggatacgaatggtaattggaacctgtccgtacccgccgccgatctggcgttgctgatgaatggcactagcaccattcatgcctcggttaacgatccggaagggcgtcaggtcaccggcagccatgatttcatggtgaataacaacttcagcgccatagctatcagcccggtgtccggcgatggcctgattaatgcgaccgaagcgcaaagcgatatgaccgtcagcggcagtaccagcaatgttgctgccggtactcaattgacgctgactttaaatggcaaaacctatactgcgaccgttggcctcaacggcagttggagcgcgcagattccggcggcggatctggcattgctggccgatggcaacatcacattgactgtaagcggcactgatgccgccggtaatccggtcagcggatcgcagcaactgggcatttatatccacgatctgccgtcagctagcctaaccttgccttttggtgatggttcattgaacggcgttgacgtgcaggggaatcagacattaagcggttcgaccggagtcagcggtgcggggcaaaccgtgagcgtcaccattggtggcatgacttatccggcagtggtagcagcggacggcagctggtctgtcagcattccgacttctaccttacaaggtttggggcaaggcccgcagccgatctcggtgacggtgagcgatatcgcaggtaacaccaatacccaagtcacgccggtattggtggatactttcgcgccgaccataaccctttcccctattgctggcgacggaacaattaacgcagccgaagccgcgttaccggttgccattagcggtacttcttctgaagcgggctcgactattacggtgagtttcaacggcggcagctatatcggcgtggtgcaaaacgacggtacctggagcgtgaatattcctgccagcgcctttgtcggtctgccggatggcccggcattggttagcgtgacggtcactgacgtcgcaggcaatacgacgacggtcaataaaaccgtcattatggatgccgctccggctaatttgccaacgttggatatccataactttgctggcgacaacgtactggatggcgccgagcaaaaagtgaatcaaaccatcagcgggagtacgactcatatcgaagcgggtcaggttgtgaccattactttgaatgggaaaacctacaccgcgacggtggatggagtggggaactggagtactcaggtgcctgctgccgatttggcgttgctagccaatggaacaaccaccatcaatgctcaggttggcgatgtcagcggtaacctggcgtttaagagcgaaattattgacgttgatagcaccaagggggggctggctatcaacaccatcgctggtgataacttactgaatattcaggaagcgtccgcctctatcaatattaccggtacttctgccaacgtagccgtggggacgctgttacaggtgacgatcggcggggtgccttattttactacggttcaggccggcggcgtttggagcgtaaccatcccatcggttagcctgttcgtgttgcctgatggtagtactccggtcaccgtttccggggtcgatctaggggggaacccggtttccagtactctggacttaggcgtattcatacataatccacccaatatttcggtcgatccgctgtttatcgatgacaggctgaacgctgcagaagtagcggtcaatcagacgattaccggttctaccgggattaccggccctggccaaaccgtggctgtgacttttggcggtgtcacttatcagggtaatgtggctgtggatggtagctggagcataacgctgcccagtgcggcgttacaggctctggggcaaggtctgttgcctttcagtatcatcgttaaggatattgcgggtaacgaaggattctttgcgaccagtattctggtggataccgttgcgccaacgttagccgtgaacccggttgccgatgatggcattatcaatctggcggaagccactgcaacggtagtgatcagcggaaccagttcggaaattggggcgcagatcagcgcgacgctcaacggaaaaacctattttgcaacagtattgtctaacggtacctggcagttcagcgtgccgccggcagatctggtggggctggcagagggcaactattcgctatctgttatggtaaaagacggcgttggcaacacgacaacggtttcacagaatctgacgatcgatgccgatccggccaatttaccaacgctgaccatcaatccctttgcgggtaacaatattctggacggtgccgagcaacaggtcacgcaaagcatcagcggtgtcaccactggtattgaagcgggtaagagcgtgaccgtgactttaaacggtaaaagctataccgcaatcgtagccggtgacggcagttggagcacgcaggttccctccgcagatttggtgttactggcgaatggcagcgccactattactgctagcgtcagcgatgcagccggtaatccggcggtaggctcggaaactattacggtaaataaccagttagccgggctgagtatcaatccggtcgctggcgataacctgattaatgtggctgaggccgccagtaatattaccgtgagtggcgcctcgaccaatgtcaatgtcgggcaaattgtcactctgacgctcaatggcaaaacctataccgcgacgattggagcgggcggcgtatggagtgcgcaaataccagcggctgatttggctctgctggctgatggaacaatgaccctgactgccagcgctaccgatgcagggggtaacccggtttctggttcagtagatttgggtatttatatccacaacctgccggtcgttagcgtcggtcctctgtttggcgatggtgtggtgaatattgccgaagcggcggtaaatcaaaccattaccggtagcactggcattaacggcgcggggcagaaagtatccatcaccgttggcggcggaacctataccggaatcgtggcggcggatggtagctggagcgtcacgctgccaagtgcggcgctgcaaggattgaatcaaggcagtcaaccgctgatagtgacggtttccgatgccgccggtaataccaacagcctgagcacgccgattacggtagatacccaagctccgttactgactctggcaccgatcgctggcgacaacattattaacaaccctgaagttcaaggcgtaattacgctaaacgggactagctcagagctgggcgctaccgtttttgtcacgatcaatggacaaacctataccgcggtagttcagccgggtggtaactggagtttgtcattgccagcgggcgcgctgtctggcctgagcgatggtaactatgcgttcacggtgaaagtgacggacgcggcgggcaatccgaccacggtaacgcaaaatgtcgccgttgatgccgatccggctcatttaccaactctgagtattcatgtttttgcggggaataatattgttgatggtgctgagcagcaggccgcgcaaatcatcagcggtgtcagtaccggattagaagctggacgtatcgttaccattaccttgaatggcaaaacctataccgccgcggtcggcagtgacggcaactggaatacgcagattccggcggcagatttggctctgctaagtaacagcccgttcaccatgaccgccagcgccacggatattagcggcaacccagctaacggtagccaaagtattacggtagataacaccgctagcggtttgtccattagccagctaaccggtgataacctgattaatgtggatgaagctctggccggtgttacggttaatggtacttccagcaatgtgaacgtgggtcaaagcgtggttatcacgctgaatggcaaaatttataccgcgacggttcaggctaacggtagctggagcaccacgatcccgaccgttgatttagggttactggccgacggaaacattactttattcgccaccgctaccgatgctgcgggcaattctgttagcagcagcgccgatctgggcatctatctacacagcctgccaaacccacagatcaacacgccatttggtaatggcacattagatgcgagtgaggcggcggttactcaagctattaccggtacaaccggcgtcagtgggttggggcaaacggtgacagtgactatctctggcgtcgagtatcaggcgcaggttggtaccaatggtcagtgggcgctcaatctgccgagtagcgttttacaggggatcggccagggggcgcagaccattgatgtgactgctaccgatgccgccggtaacttcgctagccattcaatcccaattttcgtcgataccgtgccgccaacgctgactgtaggcaatatttccaccgataacgttgtgaatgcgttggaagcaacagccattataccgattagcggcacgacgtctgagctgggcgcgaccgttagcgttaccattaacggcatcacctataccggcttagccaatggtttaggcgtctggaccgtcaatattccggccaacatcttgaatcaattaccggatgggacttatccggtacgagttagcgtcgcggatgctgcgggcaatactaccgtggatacccagaatattaagctggtgactcaaggcgtgccggttccattcatgaatacgccgtttggcgacggatatttaaacgccgccgaagcgggaaccagccaaattctgactggcagcaccggcgtttccggtagtggtcaaagcgtcacggtaaacgtcggcggtacgcctcacttggtcagcgtggacagcaccgggaactggcagttggtgctgcaaagcagtgaacttttggcattgccaaacagtcacgtggcgattgtcgttaccgcgaccgattcatacggaaatagcgtggtgttgaacggatctgcggtggtagataaattggcaccgacgctgaatattgccccgattaccggcgataacataatcaacgccgcagaagaactggcacctttggccgtcacagggacgacagatgttagcgaagccggacgtacggtttccgtggtattgaacgggataacttacaccggtctggtgctgagtgacggtagctggagtgtggcgctgagcaattcggcggtgcaggcattggccgatggcaactataccttgaccgttagtgtgcaggatctggcgggtaaccaaacctcggtagatcgggtgattaccattgatgctaacccggctaatttaccgaccatcaccatcggcgcgatttccggtgataactatatcagtcgggctgagtcaacacaggacgtattgataaacggtgtaactgaacgcgtcgagcaaggtcgtcaggtcaccgttgtgttaaatgggaaaagctatttcggtacggtgcagccgaacggcagttggtcggtaacggtaccggccgcagacgctacgctgttgccggaagggccactcacggcgcgtgccaacgttagcgatttggccaataacccagcctcggatgttcatcaagtcacggtcattgcgtcgctggcggatcagccttctctgacggttggaaccgtggctggcaacgatattattgatttgcaggaaagtcactcgccgctgattatttcagggaccagccagcgggttccggctaatcaaacggtgaccgtgacgttaaacagtaaaacctataccgcgcaggttcaggccgacggtagctggcaggtcagcgtgccttctgccgatgtgaaaaacttgccgcagggcagtaataccattgaagccagcgtgaacgatgcggcgcagaacccggctaatgcgactcaccctgttagcgtggatactcaggcaccgctgctggtggtggacgtggataccagcattaacggcgtgctgaatctggcggacgcattgctgggcttggtggttcacggcacctgtgttggcgatacgggcctacaggtgaccgttaccgtcgcgggcaaaccttatcaggcgacggtgcagaatgacggcacctggactttaaccatcccaacggcggatttactgctgctgggtgatggttcgttggtcggcggaatgaatgtaagcgtcactgatgccgccggtaataaatccgaacaggtggtagatttgaccgtcgcggtgcatcaattaccgacgctaaccttcgacccgctgttcaccgatggcattctgaatcatgccgaagctgctgtaagcaccactttgaccggtgtcagcagtgggctggacgtggggacaccggtaaccttaacccttaatggtgtaggttatctgggcagcgtgacctcgttgggcgtgtggcaggtgaacgtcaatgcatcggtactaaccggtttggctgacggcacgctgcaagtttcggtttccgctacggatccgactaccggcaacccggccaacggttcggccagtctggatgtgctaacgcataatattccgaatgtcactttcccaaccttgccgtttggcgacggccttatcagtaaagcggattccgatttaacccagttattaaccggtcaaaccggcgctaccggtgctggacagacagtttccgtcaatattaacggtgtggactatctggctaatgtggcattgaatggtacctggacgctgtcagtgccgagtctgatcctcaccggtttgaccgacggttcacacactattaccgtcacggcaaccgaccgcgcgaaaaacgtgagcgtggaaagtgtagacttcacctcgattatcaacagcatgccagcaccgaccatcagttccgtcagttttggcaccgagctgaatgcgaccgaggcgctttctccagcgctattgaccggtactgtgggaacccccgggacttttggcaatgtgcagggtgtcacggtctttatcaacggttttggctataccgccacgctaccgaatccgcaggatggcacctggtctctcagcgtaccgtcagcaatattgaaggccttgccggacggttcatggccgattcaggtggtgaccaccgatgcggcgggtaatacaggttctgtgactggctcggtcgatgtactgattcacggtctgccaaatccgaccttcaatcttccgtttggcgatggcattttgacgtacgcggaaggcgcactgacgcaaaatctgaccggtaccaccggcgcgctcggggcggggcaaacggtgaccgtcgtcattgactcactggcggggttaacctttagcgttactgcgaatgcggacggcacctggtcgctgcctctgagttccagtgtgttgcagtctctggctggtggaaaccatacccttagcgtcaccgtcaccgaccgggcgggcaatgaagccactatcacgccgccgccgtttttatcgcagcagcaattgcctttgccaaccatcgatactctgtcgtttggcaccagcctgaacgcatcggaagccgctggtctgattattattcgcgggactaccggattgagcggtttgggccagaacgtttctctgaaaattgatattgctggtgtaagttaccccggcattgttgattcagtcggcggctggtcggtgaacattcctgccggtgcgttaggtggtttactcaacggttcccattctgtcaatgtcaccgcgaccgattcggtgggcaatagcggcagcatcagcacgccgttcgatagttatgttgtgttacctgttccaacgatcaatacgccaatctttggcgactatctgagcgccaacgaatcgaacgctggagtcacctttaccggaaactccggcactttaggtgcgggtcaaagcgtgaagttttacatcaatggctcagaatatacggcgaccgttaacccattaaccggattctggactgcgcctgttagttctcctgacttaaaactgttggtggatggcgtacaaaccatgaacgtagtggtgacggacgctggcggtaacgttgtgaatacgacccaagaattcacctccgttattcataatttgccgaccatcaccgttggagcttacagcttcggtagcgagctggactttagcgagagtcatactaatcagacaattagcggaacgaccacccacatcggtattggtcagcaaattaccgtgaatgtcggcagtctggggccgctaacggctaccgttggtgtgggcggaatctggtcactgacgttaacgccggttcaaatgacggcggcaagcttgggcgccagcccggtacatgtttctacatcttatacggatatggccggtaatccgtccacgggcaccgatctgccagactttaccctgagcctgacgccgccggcggttaacctaacgatcaacgcggttgctggcgataacgtcattaacgttgcggataatttacagggtttacctactgaccttattaccattagcggcaccgttactggtgcgaaccccttattacaaaccgttacggtattgattaacggcgtgccggtttccgtatcgttaccgattaccagtaatacctggaccactcaggtattggcctcgctgtttgccaacaacgcgacaaccaccgttgaagcaacgctggtgggcattggcagcccggcttcggccacggtatccgttatccgtgataccacggctccaacgctgacgctggctgattttgcgggtgacaacatattgaccatcgacgaatctcaaagcagcaagacaatcagtggcaccgcctcactggatgtggttgggcaggtggttaccgtcacgctgggagccaaaacctactttgcagaggtattggcgggtggcacttggagcgtgacggtgtcgcctaccgatctacaagcgctggcgcaggggaacgtcactctgtcagcctcggtgaaagacagtgtgggtaacgtgggtggcgcgagtgaaaccattgtggttgataccgtagcgccgcttattttgctggatgtcggtactaatctgttgaataacctcggcggattgttatcaggtacggcgaccggtgcggaaggtaaaactttgaccattacgctggggagcaatccggcaaacgtgatcaacgtagtggtgggatccgatggtaaatggacggccaatatcgatccctccaatctggttggtctgattaacggtccgctggtggcggatattaccgtgaccgatggcgtaggtaataccgcagatacccatgtgactcttagcgtggcgctcaacaatacgctggcgctggtggttgacccgctgtttaacggtggctacctgaacgccgccggaactttggtttcgcaggttatttccggcgttgccaccggagccggtttaggggccaaggtgaatctaaccctcggcggtgtgtcgctggaagcaacggtgggtagcaatggtaaatggagtctgacgattccgagtgcccagttaggtaacctcagcgacggtttggttcacttggatctggtgctgaccgatgctaacggtaacatcaccaataaagtggtggatctgaacgtactgagtcacttgctgccgagctttggaaccaccagtcaggtgtttggccccgatggcattctgagcgcggcggaagccttaaccactcagacgctgagcggtgtaattaacaacgttgcgccgggggcgttagtcacggtaaccgtaggcagtgccttgctgtacaccacggtcggcgctggcggtgcctggagcatcaatctattaccagcgttgctgggtggattacaggatggttcgttgcaaattggcgtttcggtgaaagatgtggccgggaatattgttaattcggcgctaaatctgaatgttttaactcacaacctgccaagcattaccctgaacccgatctttggcgatggaatcctgaatctggcggatgtatcgctggggcaggtcatcagcggtgtgaccaagaatctaccggctggatcgaccgtcaatattctgtttggcagtacgccacttagtgccatcgttggggcggacggtaccttctccgtaccggttccggcgggcttgctaagtgcgctgaccaacggcacggtgaatgtgaccgctaacgccagcgatgcggcgggcaacccgacatcgtcaaccggtgtgctgaatgtcagcgtcaccttaccgcaaattaccttgccagcactgtttggtgatggatccctgagtttggcggataccgcagtggctcagttgatatccggtacggtgagcggtgtagccgccggaactcaggttaaagtgagcctaggggggaaagatttcttcggcgttaccgcagccaacggcagcttcaacattactttgcaaccggccgatctgaaagcgctggcggacggtaatctgtctgccattgtctcggtgaccgatgcggcaggcaacaccggcaccgccaacggcgcgctgaatgtcattatcaacaacgtaccgaaactgatactcaacccaatcttcggcgatggtctgctcagtctggccgattccttactgccgcagattattagcgggcaggtggtcaacggtgtggttggctcgcaggttcaggtgacggtgggagccacgacgctgtatgcaacggtcggagccggtggaatttggagcctgcctgtgctgccaggaattctctccggattactggacggtacgcaaaacatcagcgtttctctcactgatagcgtcggtaacaccagtagcgccagcggctcggtaaaagtgcaaatccatgcactgccaaccctgacggtgcaaccgatctttggcgacggcgttctcagcgtggcggatctgttgacggcgcaaaccatcagcgggacgtcgaccaacgtggccgtgggaacgcagatcagtgtcacgctgaatggaaaaacctacctgactacggtggggaccggcggtggctggagcgtggcggtaccaccattggatctgaaagcgattctgaccgatggcagcatatcggttaacgcgagtctgacggatgcagtgggcaacccggcaacggtttccggcttgctgaatgttatttctaacgcgctgccgagcctgacgttagaccccatctttggcaacggtttgctgaacgcgacggaagcggcgctgactcaaactatcagcgggcaaaccaccaacgcggtgggttcaacggtgaatctgaccgtaggcgggctacatttcagtaccaccgtgggcgcgaacggcagttggagcatcgccataccgccgaccagtttgtcccagttgctggatggcactattggcgttagcgccaacctggtgaacgccgcgggtaatagcgcgggcgcggcagtcaatgtgacggtgggcattcacaacctgcctactttaagtctgggcaccttctttgggacggaccactacctgaacgccgccgaagcgttggccgcgcaggtaatctccggcaccagtactcatgcggcgggggggaccgttaccattaccttgggcggcgctacgctgacggctagcgtcaatctggatggcacctggagcgtgccaatcacgccatcggtgctgaccggattactggatggtactgccaacattggcgtgacactgaccgatgccgtgggcaatagcatcactgataactcctcctttaccgttaaaacccatgcgttaccgctgctggggattaacccggttaccagcctattggggatattgctaaatggtctggtggtttccggtagcagtaaaaacgtcagcccgcctgcgcaagtcagcgtgaccttgctgggccagacactacagggcgatattgctccagatggtaaatggagcgtgaaattcaccggttccattctgaatctactgaatctgggcaacctgctgactacgctggtcaacgtcgcggttactgatgaagccggcaaccataaagagttaaccgtcggcttgggcgtggggtctgtgctgccgctttctctgtcggcagaatcagaggctcaggccaccagctttatgctgaccagcgatactgacaccagccacaccaccacgtcagatcagcatcaaacggcggcgattaatggtgaaagtaccgataccggattacacactgcggctgcggcgaatacggtacaggcggaatccacgttggtcgaaccattggcgcagcaaatcgatagcatcctgatcacggatgtgaccgagggcggctacaccatcggcggcgttacgctgaatctagcggatggcaccgtgctaagcggtgagtcgctgaccggtagcgtcgagaacgatgagttcattctgaatactatggactttactcatatcgacggcggtttgggcaccgataccttgttgttgggcggtctgcatcaggtgctggatctcaccagtctggggctgaaagtcgaacatatcgaggttattgatttaggcaccagcgggactaacagcattgtgcttaatctacatgatgctttaaccatcactgataaaccgcaggacgacctgctgattaaaggtgcggaaggtagtcaggttacgttgagtcataccgaaggcggcgtctggagcagcgtgagccagcgtatcgttgatgggcaaacctttgacgtataccacaactcgtcattagacagcagcaatactctgggtgatgtactggtgcagcacggtttgcaggtgcatctggcctgaggctaagcggcggcgaggtgacggcatgtccctcgccgtatttttataataaatcagatggttaaacgctggattcatcagcgcgaaatacgaggttgggaagtatcggaatgggtgcctgggagcgcctttttcgcagggcgcaaagccagtcggcgtgactggctgatacatcagtacagcaacatgattctaataaagaatctcggcaacggagtcgtgtcggtgatgaaaaaaacacagcagcaccttctgccctggcgcattgtgggcaacttgttggcagtaggtattttttcaattggaattaatgccgctacgctggctgaaaatgtgccaccggcggcagtttttaactggcaggcggcacccagcgaggaagcccttgctgaactcagtctgcgggaagccattctgcgggcttttgcacgtaatccgcaaatcgctcaggcgtccgcgcaaattcgggtgggacagggggatttggacgtcgctgaaagtgcctggtatccgcaaatttctttacagggaacggcggggaaatcccatcaaactgattctgccggtagcctgaatagcaacgcttctgctggtgtgatgctcagtcagttgttgtatgacttcgggaaaaccggaggcagcattgatgaacagaaacaactctccgacgcctatcgctatgaattgtttaacacgatgaccgccgtggggttaagcactttacaggcctatttacaggtcaaacgctatcaggcgctcaccgccgcggccagagacaatctggcttctctagagcgagtcagagacattgcccaactgcgggcggatgccggtctcagctctcagtccgacgtattacaggccggaacccgcattgccggtatggtggcgacgctggagcaatatcgggcgcagcagcgctcggctcaggcgcagcttacggttcttaccggtgtggtttccgacaatctgccggatctgcctaaaacgctactcaatcagaaaattgctctaaacgcgattccttatgatgccagcagcgcggtgcggggggcggaatccaagcagcaggcggcaatggaacgggtacgacaaaatcaggcgcagcactggccgacgtttaaagtacaggcggggcgtactcgctatgaaaatgactcacgatcttactgggacgatcaggttcagttggcagtggaagcgcctctgtatcaagggggcgcggtcagcgcacgagtacgttctgccgaaggagccagagctgctgcgcaggctgaagtggaaaaagccaagctagatgtgaaccaacgtgcctcaaccgcttatgccgacatgattggggctcagcagcgccagctcgccggcgagcagcagttacaaagcgcgcgtcatacccgcgaggtttatcaggatgaatataagctcagcaagcgcagtctgaacgatttgctcagcgtggaacaggatgtattgcaggccgattcaatgcgtctgatggcgctgtatgacggctgggatgccaccgcgcgttatgccgctgcggtagataatctggtcgatatgttaggaattgatcgtgtggcccagagcggtgaaaaactccccgctctctgataaccgccccttacgcgattgaggtaaggatgaggtgtttaattgaccgtttctgatgaggcgacaggggtaacatgacagtacaatcaacgccaacggaggtttggatcactgcaatggcaagggttgccagccgctatggtcaaccggccgatatccatttcctcggccagcaaatgcgctggtatgaacaactcagctggccacgccagttggagcgactcagtagtttgctgggattacaggtaacgctggttccgatcagcaaagtccattggcgcaatgaattaatgccggtgctgctagagctggaaccgggcagcgtagcggtagtcgaaggcatcactgaagcaggcctcgccaattattggttgagcgacggcggcgatttggtgcgagaagcggagctgccagagctgctggcgcgcagtccgggcatggccattatggttggcattgccgcccgaggccgtgaccagcgcattgatgaatttgtgcaaccttaccgcaaacattggttttggcgacattttcgcggtgccggacgcaaaattgccgaaatttcgctggcgtcagtcataggtaacgtactggcgctggggggaattctcttctccatgcaggtctacgaccgggtgattccagcacagtcttattcgacgctgtgggtgctgttcattggcgtactgctggcggcggcgatggagtatgtcattcgactgacccgcacgcaggtttcggatctgatggggaaaagcatcgatctgaaagtgtcctccatgctgtttgtgcgtgcgatggcgattaagaacgaagcgcgtccgaaatctaccggttcttttatctcacaactgcgtgaaatcgatcaggtacgagagctgctgacgtccactaccgtgggcgcggcggcggatatgccttttgtgctgttgtttttagcgataatggcgtttatcggcggcccgttggtgattattccgctgctggcgatcccgctgattgtgattcccggtttactgattcaatggccgatggccaagctggcgaaagaagggatgcgcgaaggcgcattgcgtaacgccattttagtcgaaactatcgaaggcatcgaagacataaaagcgttgcaggctgagccgtatttccagcgtcaatgggaacaaactcatgaagtcagcgctgcagtagggatgaaacagcgtctgtggggcgcccgcctgaccggttgggcatcaacggtacagcagctaacctacgccggtatgctggtattcggtacttatctggttttggccggagatatcaccacaggtacgctggtcgctagcagcctgctttcctcgcgaactattgcgccgttgatgcaattaaccatggtgttttcccgttggcaacatgccaaaagtgccatgaccggtctggacgaattgctgaaaaaaccgctggatcggccagaagatggcgaactggcgcattgtccggtactcaacggccactatttgctgcgcaacgtgcaatacacctacgatgcggagaaagggcaaaatgttattggtatcggctcgctggaaatcaaacccggagagaaagtggcgattcttggcaaagtcggtgcggggaaaaccactttactgaagctattagccggtcaggctagcgccagcaaaggcaaagttattattgatggcgtggatatgcagtgcattgaacccgccgacttgcgtcgccagttgggctttctctcgcaggattcccgtctgttcttcggctccttgcgccaaaacctgatgcttggtcatccgcacgctactgagcaggaaatgcttcaggcgctgcgtatcagcggtgcgctcagtttggtacagcaggacgccgccagcttggatcgcattattaatgaagggggacgcggtttgtccggcggccagcgccaaatggtattgcttagccgaatgatattgcgtaacccgcaggtagttctgatggatgagcctaccgcttctatggatgaacagctagaagactatgttattcgccaaatgaatgcgtggctcaccgggcgcaccttagtgctagtgactcatcggccagcgctgctgaaattggttgaccgcattatcgtgatggaggggggacgggtgattgccgacggcccgcgcgaccagattctcaatgcggtatccgcggcagaaaaatccagacagggtgcagcgtaaggggaattagcatggcaaatttaggcttgcagcaagaaatggcccaacaggaacggcggatttccgccattatctggtttacgctggtggggatggtggtgatgtttgtctgggcatattttgccattctggatgaagtgacggtgggggtagggaaggtcacgccctccagccgtgcgcagctgattgaaagtctggacggcggtattatcgatgagctgttggtgcatgaaggtgccattgtcagtaagcaacaggtgctggctcgtctcgatcccacgcgttttcaatccaattatggcgaagctgctgcgcgggtgacggctttgcgtgcttcttcagagcgtttacgggcggagctgacaggagagaaactggttttcagcgccaaaaccttaaaagaaccggctttagcagcgcgagaaatgcagctttacctctcacggcgacaaaatatgatggaaactgtcagcaaccttcagcagtctctcaaactggttcagcaagagctgcaaatgacggagcctctggttgcgaaaggtgcggccagccaggttgaggtgatccgactacggcggcaagtgagtgagatccgcggcaaaatcgatgatgctcgcaaccaatatgcggtcagggcgcgtgaagagcaggtgaaaaacaatgccgatctggatgcccagcttcaggtggttgccggcaaagaagatcagctgacgcgcaccaccttgatatcgccggtgcgcggcatagtaaaagatattcaggtttccactgtgggcggcgtgttacaacccggcggtaagctgatggaaatcgttcctatagaagaacagctcttaattgaaacgcgaatcaacccgcgtgatatcgcctatattcgccccggattaccggccacggtaaaaattactgcttacgattcatcaatttatggaaatcttaccggagaggtagagtctgtatcgccagacacattacaggacgaagtgcggcgcgatcagttttactatcgcgtgtatgtacgcaccgacagggcagagttaaccaataaagccggtaaagctttcccgatattaccaggaatggttgctagcgtagaaataaaaaccgggcaaaaatcggtgatggattacttgataaaaccgcttaataaagtgaaggagtctctgcgggaacgctaattatttactgagaatcctcagtctacgctcaaaataaacccccaaaccctttcttgttgaagggttttatttcgtttgttaggcggggaattcactcggtaatctgagctttacgtgctgaaataaattaatgaaactatacatctcaataattatcacgtgtaactatttagcaaacagcagaaacaaatatcctcaatctctccttaattgtgataaataaaaaaagccgatcaagagatcggccgttaaataaacgtatttatagagatgctttaatccgaaatgtgggtaatagcaaaaataatgatgatagcggaattattatatcgtgatggcttacggtgtttcttatcaattagtgctaaaaatgaactccagttaattctttgattttaatgtattttttattttatcttgatttttggtgctataaataatgtattttatagttctgtgaaagttcgctcgtatttacattatgaaacccttagttgctgtattgaaacatgttcggctatttagtagcattttctgtatagattaatattattcttattaccacaatagcaatacccaattgggataaattgctcgtcagagcagtggcgataataagacataattaccgaggataataacgatgaaacttcgagttctttctctgctggttccagcattattagtagcgggtaccgcaggcgcagctgaaatttacaacaaagacggtaataaactggatctgtacggaaaaattgatggccttcattatttttctgataacaacggtgtggatggcgatcagtcttacatgcgttttggcctgaaaggcgaaacccaaattagcgatcaactgactggttacggccagtgggaatatcaggcaaacctgaacaaagctgaaagtgaagataacaaaaacttcactcgtgtcggctttgccggtttgaagttcgctgacttcggttcactggattatggccgtaactacggcgtggtttatgacgtcacttcctggactgacgtactgccagaattcggtggcgacacttacggcccggataacttcctgtctcagcgtggcaacggcatcctaacctaccgtaacaacaatttcttcggtttggttgatggcctgaacttcgctatgcagtatcaaggcaaaaacggcagtggcaccgaaaccaataatggccgtgatgttcagggtcaaaatggcgacggctacggtatgtccgtgtcctacgatctgggctggggcgtaagcgcatctgcggcgttcgctagttcgaaacggactgacgaccagaacgctccaggtatctatggtcacggcgaccgtgcggatgcctataccggtggcctgaaatatgacgcgaataacgtttatctggcggcaaactacacccaaacttacaacttgactcgttttggtgatttcaaaaacaccagcgctgacgcggcttacggcttcgctaacaaagcgcaaaacattgagttagtggctcagtatcaatttgattttggtctgcgtccttccttggcttacctgcaatccaaaggtaaagacatgggtaactacggcgaccaggatttggttaagtatgttgacgtcggcgcgacctacttcttcaacaaaaacatgtctacctacgttgattacaaaatcaacctgttggatgacactgccttcaccaaaaatgccggtatcaacactgatgatgtcgtcgcggttggtttggtttaccagttctaatcccgatggttctgggcaagatctgatgcagaacgcggccaaatggccgcgttttttacatacgcgctcggtgagtcggattggttgaggacatgcgttggggctgtaggcgaaaatttggggataaacgggttcttcagcgcatttttatcgttcccgctaagatttagtccggttttgaacaagatggaataagtaaaagagtgaagcgctgcaacagcaacgggttcagtcacaaaaacagaattaattttgttcaatctgactttttttaatcagattcagaacgaagtttgaccaaacgaattaaattcccattttttttaaatgaaacactagacatatcatcgcgctaagatgataatgccgcccattggaaggatggctgagtggtttaaggcagcggtcttgaaaaccgtcgactgtaacaggtcctagagttcgaatctctatccttccgccaaattcgccggcatagctcagttggtagagcaactgacttgtaatcagtaggtcccgagttcgactcttggtgccggcaccagcagtaagaaaaaagacatcttcggatgtcttttttttcgcccaaaattcacctcctgacctttgccaaccttcggctctatcgagctaatctcggaaagtctttatactgagccatcgcctatcgtgggcattatgcggaatcacctatgtttcccccgttaaagactcagcgttgtcgattgcgaaaaattcgccctacggatattaaacaggtttttgccgcactgtctgatccggcggtaattacccactacggcgtggcttattcctctctggccgccacgcagattcagatggattggtttagtaatatctatgcgcagcagagcggtatctggtggggcatttgcattgccggaaacgatcgggaaattatcggagcctgcgggtttaatcaatggaatcacgacgttcgctcgctggaactgggctattggctactgccagaatactgggggcagggattgactcgcgagtgcgtcaatatcatttccagccatgcctttacagaaatggggattcatcgtattgaagccgtggtcgagccggaaaaccgcgccagttggcgactattggaaaaatgtggctttcatcatgaaggcacgcggcgggagtgcgaaatcaaagatggcaggtttattagcctgaaaatttacagtcgcctggcaaccgatgaatatccggtaggattgccctgagaaatgaaacgaaagcattgctcgttgttgaacgctgtataaagaaactaaacataacaaattaatcataaaaaactgatcataagaaactgaagccgcgagcagccgttttagcgatgctgtcctcgcagatatgaagcagtccgatcattgatggatttttgctaatgagtaaaaagggcatcggtgagatgcccttatgcctacgagttattgatccgataatgattggatcgtgattttagcgaccattgctggctaaatcggctaccagctggttcacaccatcactcatattggtgaatttggtcagctgtgtgcgcgttaccacgacgaaaacaccgatgtttttttcaggaatcatcgccatataggtaataaaaccgccgccgccgccggttttttgaataattcccggcaagccatttctcggagccatatacacccagcctaaacccaaggcatcagcctgacccggtacgtccattccttttaatgaaaccagctcatgccgctggaaatacatcttttgttcacgtttcgccgtggcttttcttggactgttttgcgtagacaggaactgctgcatccagcgttgcatatcttctggagtggagtaaattccgccgctgcctgccgccgccgtagtattacgacaggcacttccaccaacgccaaccatcagtcgatcgcattgttcagccgtcggcgtcagggtggtatttttcatacccagcgggccggtgattttttctcgcagcagcgtggtgtaaggttttccagccgctttagaaagcgcatccgccagcaggtcataggccagatttgaataagccgcccggacacccggcggtaccgtaactttggcggttttcagccattgccaacggtcgctcttagtcggccaggtaaataccggccttttttgcgggccaccgggctgttcacgaggaaatccactggtgtggctagctaagctcaacaaggtgaccggctgtttagcgttatagccggggacataggcgcctttgggggcatatttttttagcggatcggtgagcttcagtttcccttcttcagccagtttcaccatgatttcgctagtcattaattttgtaatagaagcaatacggatcagtgagtcctgacgtgggcggatgttattgcccggtcgggtttcgccaaaactacgattgaccacctgattgttatctatcaccaccagcgccattcccattgcgccactgttataaaaaatatgctcggcgtgttgatccacaacttgtgccgttaaacgttccgtttgtgcataactgtgtaccggcagagtgaacagagccgccaccagtaaggaagtagagaaagctttcaactgtttttatccattttcaaaagcagaagggaaattcaccctgctatattagtcagttattgtcagaagaaaatgaagaaaggtgcagtagcgcaatatatttatcgtggttgaatatatagaaagtcggcaatggccatgtcacccgagctttttttactgcaaatcaacacaacatgttgatattaaataaataaaattttcaaggcctgtattcagttctgaaaacggtatcggattttattcgcaccatgagcgcgctggtgtttacccgcagaatttacttcaacgaagggaagggcgttatcaaggaggaaactttgtactacagccggttaggccggaagaatataccgtattgctgaatgaccatggttcccgcctgtggtggcatcaatggccgcacctgatttcgacaagaggccggtatggctaacgggttcgtaagcccctcattctttaggatgaaagtcaccgcccttaatcagcgacggttatccttgtgtcattggctttccgctatcggtttaattaatattgcggccgtttctttaacacccaacggattattcccccagcattgctcatattgccaaccggtaagctcttcagccaccgcgcgagcgtggggaggaatatcggctatagcgccaccggctttgatgcgggcaatctcttctaacaagatagcgtggttttttcctgtctaatttcatttgcgtggtataaaaaatggcgaccaacgctagcgcaatcactccaacagcaaataccccaacaatggcctgaaccgcgatttctggttgttctgattggccggaaacaaagccgaaactgctgagcctccagcccatggaaaacacaatcaccgaacgcaccatcttgccggcaaaagtcatggcaccggcgtaaatcccctcgcggcggcgtccggtcagcactgcatctacgtcggctaaaaaggtataaaccgtccacggaatgtagtaaatgccaccggtactcagggcgaatacggcggtaatggcgaacaatacaaccaccgtggtggtttcggaccaaccggtaaaatacagcgcggcgtaggcgattacgctaacaatcacaacccgtaatgcgatacggaaagggcgggcaaagccgattttgacgcaaacaccgataaatatggcggttgatatcagttgcataatcgaactgaaactgttgagttgagaaaccagtgtggcatcttgccccagaccaaaaataataaagtaggtaaatgctgaagcgaataaccattctgcaccgaagccaaacagatacattcctaaatgcttgcggaaaatgcgcagatggacagtggacgccatatcaacgcagagttttttcagcgcttgtcccaagctattggtggtttctctaagaacttcactggccggtcgttcccaggaagaagaatacagcgggatcattgcactacacataatcaaaccgtaggcgataccggtataaagaaacggcgttggcgaatctttcccgtagatagcaataaactggccggggataaaagccgacagaaagttggccactttgccaaaaattgctttagaaccagtgagtttggatcgtttggcaaaatctgtcgtcatttcggtagccagcgtttcataaggcaccataattgaggtatagataagctcgaacagcgcgtaggtcagcaggtaataccagaaaccaaaaccgctcatccacaataagggataaaccaatactagcgggataccgagcaggataaaaaagcgacggcggccaaatagacgacccagacgagtgttatagaaattatccgtgatgtagcccataactgggttactaatggcatccagaatgctggcgatggagaaaatcgtcgctgcttcgaccaccgttaacccacagaatatgctatagaaatacatcaaccaagcgccgcttatagccaatgcgccgctgcctaagaggttggcactgccgtaagccaaggtatgccgcgctgaaatttgtctgttcattcttatcgtcgaaaaaaataaaacaatattttatttatagtgttttattgtttcttttatatgagtttactttggtcaaaaatgagtcaaggatcacgaaacagtgttttgagtttgaaagagacgagtaacctgataaaagttgatataaatcaacctaggctataggcatgaaaaacatgggtgacatcatatcgatgtgcccaacgcggcgttagaaaagtacaggctaatgagtgatggctattttttcgccgcaatacggtgatgaacgcggtaattttgagaaattggatcgtgatttttagtcaggttccaattagccaaccgatggttggagcgggtagaaataacgttagctgacgctgcctatgaggctgtaagccacatttgaggaaagacatggccagaaaaaatccgtattacgatgccagcaagccgcatcacaccgaattcgggtttcagaatctggagccggtggcccatcattcgcgggatctcaaacgttggcgcgaagaacggaaacgtcaatcattgcctaagccgccgtcacaggggtatccggcgtttattgcccaatggtggcaacaggccgagtttagtggtgaagatgatgctgcgtggtggttaggtcatgcctgtgtcttattgcgtatcggtgggcggacagtgctgtttgatccagtgctgtcatcgagagcctccccactgcatttctatggcccacatcgtaaaacgccagtcccgaccaaggttgaaggattaccgaatattgatgtgattgtaatttcgcataatcattacgatcatctggatgccagaactgtcgcccagttattaagacattctccgcaggtcagttttatggttcctctaggtttaaaaccttggttgctgaatcacggtgccaaaattattcatgaattggattggtgggaaagttatcaaatcgccgataccgagtttcattgtgttccggctcgccactggagtatgcgcacgccttgggatcgcaaccattcgttatggtctggctgggtagtgaaacagcaggggattaatttttacttttctggtgataccggctattgcccgcagttggttgaaattggtgaacggcttggtccttttaactatgcggctttaccgattggagcctatgcgccgagatggtttatgctggcgcagcatatggatccgcagcagtcggttcagctttaccagcaattaaacgaacctgttaccattccaattcactggggcgtttttgagttagccgacgaatccttagatgaaccgccggaacagttagcgttggcgctggctgccgctgattgtgataaagaccactttaaaccgattaaaattggcggccgtatcccgttaatagcctaactcattgaggtcatagccaatggcttagcgcgctgtggttccttcagataaccagggtgaagcagtactccagaaaattacattcgcacctaaatagttctctgcataatcggtaaactcagctttggtaaagggtttgccggttttagcattggtgtaggtgagggtgggttcctggacggccattccaaccagactaagcttgcctttgtattgattaaagaacggataggcatttttcatctgcgcttttttatttggtacgatatctggcccgcccagccccaccttgtttttcgcagcgaattcaaacaggcgtgacatgtattgatgatcattattccattcacaaggccaaaaattgacgtattgcaccacatgagatttagagaagactttacgggcaaaggccatattctccatctctgcggcaaagtatttatcgcagctaaagccggatttatcccttttaatatcggggtcaatggcggtttctggcagattgacgccaaatacccggccgtcgaattttgtagctaatgccgccagtagtttttgatagcgttgttgtaccgccggattccactgctgggttacccaacctgaacccgcaggcttattttcgccgggattatcatattgcggtacgataccgccgttatagcgcggatctttcattagataggcaggaacgtttttagcttgaggctcaaagaaacgatcctgaatttgaataaaaagtttcttatttaaactattaaggtaggcaaggtcacgctcgatctgtgaaaaatcatactgatctttgtcggtttctagcgccttccaattatagacaatttgtactccgccaatatcaggccgctgaatcagagaggaaatagtcgttaaatcgtctgaaccggtatacagaaagttttgcggtacagcgccagtggcagcataggaaaataacgttattagcagaccggcgtgtaataaaatatttcctgctagtttcatattcttccttaaataagttgggctaattatttttcgcgagttaacggcgataacattcgcagcaatacattcgcagtaataaaggtaacgcaattaaacacagagtaattaaacgtaaagtaataaaactggctgatagcgtacacggctaggtaccggtattcagccctcgtagcgctcgaatagccttaggctcaagatagactactgttctatgactgctaataatacggcttacaatgacgttgcgtggcccggtttgccacgcctcgctgcggtagaactgtgcctgtttgcgctcaagctctgcgagattggcgtatgagcgaatcagataataactgtcttccagttctacgcctttgccataagccactacgtccataccggctttctgatgcagtggaatactaatatcctgcataacccgatggaatatattgccgctatcgggctgtaatttatatagaagaatttcgaccgttcgatacatgtctatctccggatagatgcagatcgacggagattagctttccatagtcagccattcgtccgcttcttcaaacatctcttcgatcaatctgttcagagcagatttttccaacttggtcacgcccgatacgttgagaccgttggcctgcatggccttaacgtggacgtcagcctctggatgaatccgatgcacacgtttggtcaactcttctttgatcaaatcagtggcgttggtcagaccgccgacgtttcttttgtcataaatcaattcaatacgcatatcttcccctaaaaatgtcaggataacccattcaaaaacaactgggttaatatacagtattggcgcgttgacaccaagccggttttttctgctgccaggaatttaggacagtatgtaagactgaacctagcgatatgtcagggtaaaactcgctacgctattggccgcccccggcgtgattttgaccccggtttggtaataacgagcagtcatcgggatttcattagctccaaccgtggtgctatcgagtaaattcgtgggcgcgcccagcggaaggggattgccatcatacaggatctgaattcccagaccgctagccacctgttctcctgtattgccgtttaacggcaatacattgtcgctactgccggaagtccccagagtgagtgaaactttggtgtcaacttggcagtccagcccgatggtaaatgggacggagcggccatagctgccggggccggagaaagaatgactattgacggtacccataggaacctgaatggacggcgtggtggtgttacagccgttgacctgaatatctaccgctgggaaggatatttgacctaaacccttgccatttgtgatacccagacaggtgtaactcacactgaccgggttatatgccggcaacgtgccagaggttatatcggcatatttcaccaggaaatattccagattggtgcgcatcaaatagccttcataggtgtactgtggtgcgtaaacatctagcaatccgtctctaccgtcggttctgtacgcgatgccgacgccttcctttgaagttttatacactggcattgaatcgtaatagatgcccgtccatttagtggatgttcgtggttgaagaacgaagttccccggtgcgccgaacgagttgttttttactacttttaccgcatagctataaacgccagaggcaagtaatgagcctatcggggcattcattggaacggtaacgggtccctggctggtactggggtagatatcccacaccgcccagcattcagcttcggcataacttttgggtgtgaaaaccaacgtcagcagaagaatgagataaatccctttttgtcttatggacaacattttcaatctattcagcataaatttctcctgctccatgagagagtttccctcattaagataacgggggaatagtggttagcgttttcttttccacttaaccttccccgtcatctctccattgtggccaataaatattataaatttcaatcaattagttttttttggccggattttagccagcttatccagtcgcgtatattccggatttaaatatcaataatggcggcttatttttcgctgcggctgaaactctggatcgggctgatgagtaatacggttacgaatatctcttctgaatatttcgatagtccacatccacaccacgtgaccgaacgtttcggataaaagctcttcaaaaggcaggtgccacagcggtgggccccagccgaaaagtggtaacagcacgccgtggaaacctaaagtgaccagaatggcaaaagccgcgccctgccagagtttgatcgtcgggaatatttcagccactaagcaatagaacagggcaaacaagatggaaaatagctgatgaacgcccgccacgccccagttaataatatggcctgaatattgatagatcatatcgttgaccttgaaacccaaatcttgcagcatctccgccggcggaatggctctgtccgctgtccttgggggaaaagggatctccgctccccatttgacgaaactggcaatattcccgcctaaaaaaccggcccatagggcggcgctatagttcctgtattttttctgtgtagtagcaaaacgtaattccataaatattccttgtttaaaacggccaatacttcggtttttaggctgaatattttattaaattatataatttaataagttagagcctgttgaatcacccttatttagagaaaagcgaagatcgccggatgagaaatagtgttccgagtgatgaaaaaatcgcttttatctatcatcttttatctatcatgctgtgttgctcctgtcctcaatttcccgaaatgacaatatctatctgaaaaatatgaactttatatcagtaattctctcgtagtgattgaccaatcatctgctacctgtaattcagcgtaatattggccgtgctgctggctcgacctgcgttgataaactcttctttctggtaataacgggcggacagtagaatctgcgcgcagcctgtttccgagaatgaaataccgctaaacaggtcccctaacgtgataggttgcccgcggtataacagttgaatgcctattccttgcgccgtaccattgccgctatctaatgccagcaggtcaggcgaaccttcaatgccagcgccgccgatcgctattttgattttgtccgtggcggtacagttgagtgggattgaaaacgccacttcatttgcagtgctattcaggccggaaaaggcgcttatttttacccgttccaaaggaatatgtagctttgccttctgaacgccacaggctcgtactcgaactgaagccccgtacatcaacccattccagtcgtaaaggccgtttcccccgctggcgaagcaggaataaccgatgttgaataatttatggcgtaatagctttccccccgaaattggcccgtacttaaccaggtaataatcaagatttgaggatatggcatcgcccctcaggtttttactgttatgggttatttgccgcgtttcggcgccaccttttgttggcgtcacggtataggccacgccaacgccctccagattggttttaaatacactgattccgcgatatttaagcccggtaaactgagttagcggattgatagtgataacaaaatctcccgctgaacccgcatacgaattatccataatacgcgccgcaatatgggtttgcccttgagccagcaggctgcctatgggcgcacttttatccacgtataccggtttgggaaaaaccagaatcggggcgtgagtgaggaaagaacgacatccggccgctccctcccgcatttcccacatcatcaacatgaaaaataaggtgatatagcctaaatagcgcggtaatctccgagccctcatccttgctccttgcctcaaaatggcggccgcatacgtttgaccgtcctttacttagctatgtcattaccgctttacagctggcctgtagggtcagtaccgatgaaccgttatcgtcagaagtttctggtaggatgtagtccgccacgcacttctgcggtgtgccgttgctgtcccattccaccagtaaacttcccttatcagggataccgctcaaataaacctccgcattattggcgacaattccgctattgattgataggtcgtcattatgttttagcgatgcgttggcgccgaacggaatggtttttccatcgaagttcagtttgattaacgctcgttttcccacgcgggttttgaaatcagccagtacaacggcacctttggtcggcaccacggttttgacactggtatcaatatcaatgttttcgcccaaggtttgggtgtccagcgcaattcggtttttacgataagtactgacataaggaacgaccgcgtaccctcgccagtcggtatagacgccgctgctattttgcaccttcactccgctggctcccggcgctttaaccaatgccagtgtctcaccttgggattgcgagaaagtgacaccgaatggatgcgcaaccacgcctccgcgcaggttatagttcaggcggcgggaatcgttgtcatagctgtaaccagagccgatttcgccataggtgccgcgatagttggcgttaaggttgccgctggcaccgttgccctgattagtataattctgctgaatgttgtaattcaggttgttgtccgccagcgcggtgccgctcaaaccgagctgctgggtggtacgcccggatttgctgtggttgacgttgtaggtagaccagctgttagctaaccaacgatcgagaggaacctgcacgctgaaagctaacacactgtcgctattacctacgcccggtgtctgggtgtggctatatgacagactgtagttaatgcctctatgattcaggttataaccggtgctgatattgcgttcataaccagattgccaccaataatcctgctgatacccagagatataaagatgaccgtatccgcccatagactgattaaggttgagctgtattttgctgcgtttattgtagtttgggcgccagccgttgacattttcccgatattcattagtttcacttaaggtataaaaaccttcagtggaatagcgataacccgccaaagtaaaattggtattagtggtactaatatctttggaatactggaaccgataagactgcccctgggttttttttcctcctctatgagaagtattagcctgagtggcatcgagagatatcgatcctatatcgccgaacccatgaccgactcctagcacgccggacgtgtatttctctgcagccaatactcccccgtacaaagtggtgtctgcgggcaacccgtaaatcagggttgactgggcaaagttcggcgttgccgcaaaaggggtggtagtgcgatatttccctgccgtaacggcatatttcaactggccttcgcgctgcataataggcacggcggagaaaggctgcacaaagctacgctcagtaccatccgcttcccgaatagtgacgtccaacccaccgctggatgaggttgggtagaggtcggtaatggcaaaacttccgggaggaacataggtttggtagatgatatagccgttttgtcgaatgatgacctgagcgttactctgtgcgataccgcggactaccggggcaaaaccgcggcggctatctggcagcatattggtatcggaggctaactggactccgcgaaattgaacgctatcaaatacttcgccgggcgtcgaactgtcacccagggtcagtgcgcctttcagcggctgaatatcccgttgtacgtaggtattaatgttcttccactcacgcccactcttattattatcggtgtaggtggagtagttacgtaaccgccaggcacctaaattggctccgctacgcaagttaagataatagttactgttagtcccttcactacgcgaatcccaggtgttagaaccggtaaagctgtagttaaccagcgcggcgggaatcccctgattccataactttgggtcaatggcatcgcgcgcttcattattaagcgccgcttgtggaatgctgatatccaaccgctggcggttaaagttgaaacgagtgaacgcttcgggaatatgttgatctaaattgctgaatgcttgagtcggcggtaacgttttaagtgatgaaaaagcctcaatattgacacccatcgcagccaattcttttgtggttaattccggcagaagcttgccgttacgatccacaaaggtcaccgagcgttcatcgactttgctgtcgtttaggtaaatatccacccgataggttccgggaatttgcgaaccggtggtagaaaactgacccagactgacgttctgaggtgtaccttctttcaattcaagcgcataaggattgaaatagtctgctgccgaaacgttgactatcggtgcagcagacgcgacagagactagagtccaaaggatatgccgggtgagtcccgctggcttgcaatgtttttccataacaaaattcctccatttggggccgaaaaaagcgtacggataccccttacccggtatggatgggcaagatgtcatttcagtcaggattaggttttgcgaattagagagaaacggtctctttggctgaaatgccaccgtaatcggtaatcgcctgccagcttatctgccctgatgcgcctgaaggtaacggccagctgcggctgcttttcggagcgatcatatccgcttcttttatctctgatttcccaacgttaagttcatagaacgaaacgtaatagggcgtgggattaaccacttccaattgattacctttacgcttgaactggagagatttataggcatttgcagcctgatttctcagcagcccggttggacgataaaataatttgatacgcgattgaaccgtgatttgtagctgattctcatcggttttatgcgttgccgggatagatttaacgctgagccagaataccgactcgcgatcttgcggtaagttaccgccggcccgaacaatacgcagcgtattctcttgctcggcatccaatcgaaacaatggtggagtgacgataaagggaatcttagtcgtgtttgatgcatccagattatcgatccaggattgaatcaggtaaggccgatccttttccgggttggttactgataaagaagcctcttttttactgccatcgtatatgacgcgtgtgctacctataacaatcccagcctgagcctgataggtaatcgttagcaggcaacatacagaaataaaagaacgtatccatgacataccagaattcctcataactaactgcccagcagattctctgccggtaaagatatttttcatgtaaaaataagcatccttgcctcgcccttgaaacatgggtgatccttttgtttgtattttttaaatttaattaaccctaactaaagcagcgctattagttataggaaatactaaactgagtgactgcattagctgggccggtcgtgacagtggcattggttgacatatatttggcaatgtagctaaagacgggattcacacctttcgtcacggctttttgcgcggaaggagccgtcatgggaatcagagttgtaccgtctgcttcataaattgcgatacccaacccagtagctacgccagtttcagtggtcaacgcgagcagattggtattattttctgcaaaaggaccatcaaactttaccaaggcctttgtcactgaatctggacaagaggtcagggtgatatcgaattttgccggcatggcagtggcaccgaccgctgggaaagccttggcgctgacattacctaaagcaaccgtctggctggcgctcgctgtgctaacggtacaagcttcagcaataactgtaccggtgaaattgatggtgccgtctgctgcatttgcagcatgagagaaagaagcaaatgctgcgctagcgagtaaaatagttgcgcgtaatttagtgttcataaaggtctctccatttaaataaatcaccctaatttacatcctaatttaggggcattttctcagcatttaatctcagtgaaataataggagccttgtctacttaatagtatttgtaataaaaatactattaattttttttgactacctattctccgacttacgttgatatgactctgcgtagggtagtttccattttctcacgacgtaacatttttaacaatcacgtcacatttgcagtgtcatattaacggagcataggtttacacaaaagatcaaaatgtaaaaactttatatcttttttaagtaaaattaagaataaaaaactgtttttatcaaataacgctgttccaatgaggtctcacacagttacattttgaaatattgaggtgattattctgacttaattcaaataagcattatttattaacgaattattattaaatatttgtcattccgattgaatgaatttatggcgaatatttagacaccatgcaaaaaaagtcttaatggattttagtggatttaatgaacttaaaagaataattccccgtgcagagatctccgttctgattaattgatttcgtatcttcgcgatataaaaacggagaaacttgagaataagatgtgatctcaattctattttccatagcacgcttttctgcctaaaactattaaataaatcatcttgttgatttaatagataggagtgggttgttagtcatatattttgaatattcttcaaaataccgaacttaacaggaaaaaaaatgagtatgggcggatgagttaatccaatgtcattcgtaaacagagttatgtgattttgagtttacaggatgtttgtctcaatgagagtcgttttcattgcaaccgattatttacacaaagagagtatggttatcgttcgctttttctaagattaatcttagatatctatataaaacaatcgccatatttaattaattcaattagttacattaatgagcgttaattcaaaggttacagggagggcaatccagcccaatcagaagaatcggccataatattgctgcataatcagcacgattgcccagataatttgattggataaatatgcactacgcaaaatgacctcaatagcttgccatcttaaagaaaccggtttcggtaatttcaatcgtcagcgactcactattgaatagaagtcgtttaccagtgcctgaatcggaggctgagtgcatcatttgactgaaatgtaaggttacggatgccgaatcgctcgcagtagcatgttcttttcatcacacaaataaaccttgggtaaaatgcgttttttttatacatttctgctctgttgaattgcttctggtagaagtgaggaagtcggcgcgagattctgtccgatacgggtgcaaaccctcagatgagggagtgttagcttaaaaattgttctacgtaggcttaacgctggcgagaggttgtgaaaaaatcagcaaaccaatcatcaaaaagttatttggctaagtctcctgtagaggctgaaaagcgcgtaggcgagttttggcaaaatctgcgtgtaacttctgccaatcttctcccagattcttcgtaacgtcaccggtgataaaagtgcttacatatcaatactttaatttattttttcgactttatcttgtcgcgtttatctaaggtttaataatttatgttaagagttggcaaattttttagcactaaattctgctaaatatagattcatagtttatttgactggcatgttaagtaacggctaatcggggtgtgtttagtagccaccgagagggcttattcactacgggaacatttaggagccatagagatttttctaactccataaatgcgagcttcggataaaaggttattttcctctacttctctacaaaagttcaaaaaaccattgtctggtataaaaccggtgtaaataactacctgaacatgtattggtggttttattactttatctctaaattgagatgtagcgcatcgtattggccttgactgagtgtggttaatgcgaaacgcataagtcttgaaagtatcttatgtgggcttagaggcgctgtaagcgaatgtttggctggtattcactcaaactctgactatcgaaataccttcttaaggttttgctaatgaatgtggggaaatgagaacttatttctcttagattaaaaagtatattagcaccaccgtagcgaatatttgttcattttcagcgcgttaacgttcggttctgattgcgctgaagctctaagagcgaaaattgcagcgaacttgttagattactttattttaccgtctcggtagcggttatttattacccgtctatggccagtgttatacacagggaaaatagaagaacagaatgtagacatacctgcccggaactgaatattgcgcggctatgctctgctattgtgaaggtttgttatttttgtggcgtattgtgagtatcccagatccacaggtgatcatgggaatctggctaatgactgatgcagcggctagacgtgtggcgtgggttgtctattgatgctgacctgaagttgggggcgttatcctactcgccatctgaaatttacatcggtgtctggttgctaatttctttggctggcgggcaaattctggcggccatactaacctaactgggcacctagtggcggtgggcattacctttacgattttagcgattacctgttgtaacctgcggatcgtatccaggagctattttatcgtcgaccatctttaagcctaggcaactttatcgacttcaggcttttcaatatcaatagtggggatgaggtgcaggtagagtatttcgcgttactggattcggtcattccaatgtttaagtctgatcaaaccgatcttttgccggttgaacagccagagattaagtcatcattaactggggaggggcacggtataattcagaatgtctgatgaaggttggttgactctacatgacgagaaattgcagggatagcgagcgaataccgctattttaccaatagtattgaccggcgttatttgtgaaaggcgtaaaaaaaccaaccacaatgggttggttttaaaaagattctttggtcggcatgagaggatttgaacctccgacccccgacaccccatgacggtgcgctaccaggctgcgctacatgccgacgcagtaaatttatactacattttctctccgatattgcaagagtcgggcgtaacgttcgcttgattattaatcagttaggctaatgtcacctagttggcaataaagcgttttacgtcggttagcacctgcaataacagcgccagctgcggtttctcatctttcacttcatggccttgcaggtcaaaggttcgataatttccactgttgtcgagcacaatagtttgggttggcgtagtaataaccagcatgccgttttcaccggtagcaagccaattatgaatccgctgagcggcaaataaatcctcaccctgcgagtaatcttctggcgaagtgcgtacatgcagtaaacgctgcatcagcgtcgtcataacatcttcatggctggtcagtttattcactttttgtgctggagtactcggccagtgaataatcagcggaacctgtaattggtgacggttaaagttgctgccagccccccaatcaccgttgccactatcattaaattctacgccgtgagacgcggtgatcaccaccacggttttatccagcaaccctttggttttcaaggtatcaatgatagtcgcaatttgctgatcgacgtttttggcaccgtcctgataatggctgataaagtcatttggcgcggccggattgccaccttccaccgggtcctgcgattcttgtgaaccaatcaggttaacgtaggagaaccaaggcgccgggctggataaattattcaaccattgttgccattccagcgttgtcgcgctgtcgctctgacgttttggctccggtaacgaaaaatcggacaaaagagcctggcgatagagcgccgactggaagccgtcagaggagaacaggccgaactggtagccttgattacccaaggcattaataaaggccgaaggttcacgggcggccaaaatgccgtccaaatacgtcggggaaatcccgtaaaacagaccaaataggccggtttctttccggtttcccgcgctgtaatgacgattgaactgaatattatattgagcaaaatcattcagagctggcatgtcctgcttcaaactatcagggcgaatcccgtccacgacgatcatcagtaggttatagccgctgcccttatcgctaaaggtaatggtattgagcggatattccacggtaacggcttcgggatttccttgttcgataatgcggcgttgatattcctgttgatccagcaggccgtgtttctccagaaacttacgcgccgtcataggataggaaagcggcagattggcacgctgcatggtgattggccgatagaaattggcgtccgcccagatataaatcaggtgggaggcgaaaaacgcagaaataaacacggcaaccagcggtttaacgaacttttgccggttcaggctacgcagcttttgccagcaccaggtgccaaaaagcatctcaaccaaaaagataataggcacagaaacaaagattaactgccagtccctggccaactcgctttgatcggggttaaccaccagctcccacaccaccggattgaggtgcaagtggaaacgggtaaaaacctcactgtccaccagtaatagggtcagacctgtagtggcaaatgcggcggaaaggaacctgagtaaccgctgcgacatcacgacaaaggtgagtgggaaaatcaccaatagataggcagcgaatacgataaaactgaaatgccctagccaactgaccagggcataggtacggccaaccaaagaggctggccaatcggaaacaaatagatagcggctgcccagcaccaggctaaacagaatattgaataaggcgaaccagtgcccccaactgatcatttgggacactttttcacgatagcgctgacgatttgtcaccatatagagatagcagtcttaattaagtaattaatgagctttatcttcacgtaccgaagcctgaagagcctcggcgaaagatcgcgccaataccttgcgttgcgctggggcaatgctggtattgagcagatttgtaaccatattccccaaaaccatcaaggaaagatcggttggggtgcggtgtttttccagtacttgaaccagttcagaaagcaactgttcaacgtgttcgtcactgtaacgagatgattgtggcataaaaagtgtgctcaacgcctgacaaagtcccacatcttaccgtatagagccgcgcttttccgctactttatagcattaagaatcaattgcagaggattcggcgttcacgccgcttttgagttgcggcatcagagcatcggtgtttgaatacgcccctagctaaaaggagtatttatcatgagccttgatatcgaccaaattgctttacatcaattgatcaaacgtgacgaacagaccctggatgtgatgttgcgggactctttactgccgactaatgcggtagttgaagaaatgatgacggaactgcatcgtgtttatagcgccaaaagcaaggcgtatggtttgtttaatgagcaaagcgagttggccgatgccttaaaacgctgccgtaaaggagacgaagattttctcgcctttagccgcgcggctaccgtgcgtctgcgggatgaactggcgaaatatccttttgccgaaggcggcgtggtgttgttttgtcagtatcgctatctggcggttgagtatttattgatctcagtgctaagcagttgcaacagcatgcgggttgatgagcagctagatttgagcacaactcattatctggatatcaatcgcgctgatattgtggctcgcattgatctgaccgaatgggaaaccaatccggagtccagccgttatctgaccttcctgaaagggcgcgttggtcgtaaggtttctgacttctttatggatttcctgtctgccgccgaaggcctggacaccaaggcgcaaaaccgcggtttactgcaagcccttgatgactattgcgccgatgcgcagttggataaaaatgagcgtcaggcatatcgtcaacaggcttatagttattgcaacgaacagttgcaggccggcgaagaaattgcgttgcaggaactggctcaggaattgcctaaactgggtgagaaggactttaaagagttctccaccgagcagggttatgcgctggaagagacgttccctgccgatcgtagcactttgcgacagctgaccaaattttccggcagcggcggtggtttaagcattaacttcgatgcattattgctgggcgaacgtattttctgggatccggccaccgatacgttaacgattaaaggcacgccgccgaatttacgcgatcagttacagcggcgtttgagcggcggcgacaaatcctaaaatagccgctcactgctcaagtgttatcgacgtaacgccacggagtctggaaacctttaacattggtttctaaactcggtggcgttatttttttattacatatccatgaggtgagtttattgtttgttttctatggttaaatttaagtgagcttaaatctttattattacttttcattaaatcctattagttaataattttattggtggcttcatggtaattccggatgccattgtttatttattctaatttgttttttatttcactcaagcatagtcttattgctcaccatggtgatgtttattttcatttaacttaacttaatttaattaccgaggatttaaatatgaagacaattgaagctactgagttaaatcttatttcaggcgcattagcaggagatgtaccaactcctgcgatggatatgacaattgctatcaccacggcgactgcggccggtgctacaactggcgcattgtttgggccgattggtgtagccgttggctctgcaattggtgcggcaactggtgctattgcatcaatgggatggtaacagttttattaaaatacttaatgctattgttttttaaatagacatttagtttgttataccggcttctctgttatttatagcagagaagctttaatgcatgtaaaaataataaatcagaagtgaggtaaatattgcctattggctgatctttcgggtggtgtagtatttatttcttgagtagcacgctattttaattggctttgtatgtgttttcgatcgaatcattaatagccagcagcagaaggtaataaaaatagcagctaataaaaatgccagtcagagtaaaccgactggcatctcccatcgcatcagcgatgctttctcattttcggcgtcccgaaatatcgatatcgcagattaaacgcgaacgaaatcgatatgagtcagttttggtttgaaagcgtgacgctgaacagcctgaacctgaactttaacttctttaccatcgataaccaaagagattggctcgttgtaaaaacctggtttgacttccatgtttttagtggtgtcatggtccagagcgatagaaaccgctgcttcctcgccaccgtaaacgatagctgggaatttatttgctgcacgcaggcggcggctcgcacccttaccctggtcgttacgtacttctgcattgatagtgatcattttgttttctcttaaaagaaaatttaccctgctacaggcgacccagcaacaggttcgatagtcggcttactttgggcgaacccagagtaaagcgggcggcattctagcgaaatatcgaccagacagcaaacaaaaccgcaaataactcagggcagaaaggcgctagccaagggcgtttgccaggcgaaaacgcccctgataatcaaaaaccttttcgcgaatttgccacccttggccccgtttccgggcaacgacaaaatcggggtgacgcagtagcgcctgctgggcgatcacgtccgtcgccgtttgccattttaaggggattcccggcgcgcgttgatggggacgcagaaatatttgctcaaaggccatacgctgtgcggacgtggtgaggcgaaagcgttcgctggtactggtgccgtcttcatcgtaataagtgattttcagccattctcctttggcatccttgcctgattccagcgccattcctccacagcgcagaaccagtgcatctttcagtcttagcgcggctttgagcatatcatcgggatcgaccagcacttcctggcactgatgacagcgtcgggcggcaatgtcattttctgctccgcaatgtggacagcttttaaaccggaaacgatagtcacattgagcgcgctggccttcatcatcttcaaaccagccctgacagcggcggccatagtgttcgataatatcgccggattcagtgcatttcccccaaaatacattggcaaaaccgcagtctgggcaaaagacctgtaccggctggctgtcgccatgaggtttactggtacccacttcgggagtgaacagatcgtgtggattaccggcgtagtcgagaatcaagcagtcttcctttcccggtgataatcgtaacccgcggccgacgatttgctgatacaggctgacggattcggttgggcgcagaatggcgatcaaatccacgtggggcgcgtcaaaaccggtagtcagtaccgccacattcaccagataacgtaattcttgttgtttaaacgcattaattaacgcgtcgcgttcggcggcgggggtgacggcgctaatcaatgccgcctgtcccgcggggagcagcccgtacacctctttagcgtgctctaccgtagcggcaaaaatcatcacgcctttgcgagtggctccatattcgacgatttggctgacaatatgcggcgtaatacggctttgctgtttgatttcccgatccaggtcttcctcgcgaaacagacccttgctattactggtcagacggctgaaatcatactgcaccaccggcatatccagccgttctggcggtaccaggaaaccgtttttgatcatgtagcgcaggggcaattcatagatgcaatcgcggaataaactattttcatcaccacgggtaatgccgtgatagtggaattgataaatccagcctttgcccagacgatagggcgttgcggtcaaacccagtaagcgaagcttcggattgtttttccgtaaatgctgaatgatttgctgatattggctgtcgtcttcatcgctgattcgatggcattcatcaatgattaacagggaaaaggcactatcgaatagtgagagattacgtgctacggactgcacgctgccaaagacgactttgccttcgctttgtcgttgctgtaaacctgcggcaaaaatatcggcatccagaccgtaagcacaatatttagcgtggttttgtgccactagctctttaacgtgggccagaaccaatactcgcccgcgagccagtttagccagctcggcaatgaccaaacttttacccgcgccggtgggcagcacaatcagagccggttccgggtggcggcgaaagtgagcaatagtggcgtcaaccgcttcttgctgataggggcggagtgtaaaagccattgcttaggctaccccaagcggaacggtggtcatttgcaacatatccttaaggtttttagcgaaatctatccggttaaactcgacattattttctattattatgcctattcggtgccataggtgcgagaacctctcggtcgggtgtaactgttcctaggatgataggacaacccccgttatactgatgtgtctcataggcagcaaatgatgttcctcctacacgatttttactgcttcatttaatttccagcgttgctactcctcaaagtggcaaggcaacgtgttgattagcaacacgaccagacaaacaggcaaagtagattcaatgcgattggacaagtttttatctcagcaattaggggttagccgtgcgttggttgcgcgcgagctacgggcaaaacgtgtgaccgtggacggcgaaatcgtcaaaaccggcgcgatgaagctgacgccagaacaggaagtgatgtttgatggcaatctgctgcaacagcaggtggggccgcgttactttatgctgaacaagcctcagggctatgtctgctccaccgacgatcccgatcatccaaccgtgctgtatttcctcgatgagccggtggcctataaattgcatgcggcggggcgtttggatatcgacaccaccggtttggttttgatgactgacgatggtcaatggtcacatagaattacctcaccaaagcaccactgcgagaaaacctatctggtgacgctggagcatccggtggctgaagataccgccgagcagtttgccgtgggcgtacaattgcataacgaggctaccttgaccaaaccggcgcagctggaagtgatagagccgcaattggttcgtttaacgatcagtgaagggcgttaccatcaggtaaaacgcatgtttggtgcggtaggtaatcgcgtagccgcgttacaccgcgaacgtattggtgccattgtgatggatgaagatctggcacccggcgaataccgcccgttgactgaagaagaaattgccagcgttggcgctccgcatctgagttaacagcgccatcgtttatcaaagcgattatgtgtgaacctaagagggaatcccttgattttagggattcccaacgtctcgggcgttgccaaaacgaaccatttcccccgccatcgtggtacgactgctctgttcgatctgaataatttatttggaacgaacggctgttgaaggagttgcaaagcgtgcaagaaaaacgaacatctcatattggtttgatcttaattctgggtttgctttccatgctgatgccgttggccatcgatatgtacttgcccagtatgccgattatcgccagagagtttggcgtggaggatggtcgcgtacaaatgacgctgagcgcttatgtgctcgggtttgctattggtcaaatgttctatggcccgatggcagacagtattggccgtaagccggttatcctgtggggaacggtaatttttgctctggcaggcgtagcctgcgccatggcgcaatcggtagagcaactggtcaatatgcgcttcctgcacggtttatccgccgctgcggccagcgtcgtgatcaacgcattgatgcgagatatgttcacgaaagatgaattctctagaatgatgtcatttgtggtgttggtgatgaccatcgcgccgctattggcaccaattattggtggcgctttgctggtgtggtttagctggcacgccattttctggagtatggccggcgcagcgctggttggtgcggtgctggtagcgttctttattaaagaaacgctaccgcgagaacggcgacaaaagttccaccttcgcaccacaattggcaactttggttcactgttccgtcataaacgcgtactgagctatatgctggccagcggattttccttcgccggtatgttctctttcctcagcgccgggccttttgtttacattgatcttaacggagtgtccccgcagaacttcggttattactttgcgctgaatattgtctttctattcctgatgacgttgatcaatagccgaaatgtgcggcgcgtcggagccattaagatgttccgtttcggcctgtttgtgcagttggttatgggcatcggtttagtggccgtgtcagctttgggactgggattctgggcgctggtgttgtgcgtggcagcctacgtgggctgtatcgcaatgattacatccaacgccatggcggtcattctggatgatttcccgcacatggcagggacggcttcatctctggctggcaccttgcgttttggtatcggcgcgttggtcggaaccattttgtcattggctccttcccgcagtgcctggccaatggttagctcaatggctttctgtatcattgcggcagtattcttctatctgtacgccagtcgtccgggcaaaaaggcggcctgatttggtttatcacgctgccggttgtttcgccggcagcgtgataaaccactttacctcaatgatttttccccgctcggctttcccttttttgttcttctgcaccaaatatttattttactgataactttatatattcaatcaccttctgaaatgacccaatcagaaataaggtgatattagtaagcgcgcttattatcatgttgattacttgttaatgttggcttgaaataagttaaaataaggaaaataacatttcgaagaatatgcggttttcgcgattattttccatgcattaaatcctcacttaataatatatttatcaatgagatgtcggtgttttcttcctggttttcggcggggaggtgttccttatttgtaaaatattaacgaaaagtaggtaaccgacttgcaagaaaaatggttgagaagacatgcggaaaggtatacatataacgaaaaaatgagatctaaatctcaaactcgctttttgggttagtgtagggaagcgggaaagacgtcagaaatggccaaataaataaccttgttagtgataggtttatgtattgttataaatttacactttgatgaggttctaatcaggcataatggcgctttagcggctataacttagttagcatgtgactttgttgtgcttttgtaatagttattgttaattttttactaggaaagacgcgtgaataatattcaactttcggtggttcatcgcctgccgcaaagttaccgctggctgtcaggctttaccggtgtcaaggttgaaccgattccgctagcgacgatagatgaaaagaacaacctgatggggttgaaattactgagtcatgacggtagcgccgccaggcaggtaatgcagcgcctgcacctttcgttgcaagaaattcaggttgattctgctattgtcgaatgggaaggggagccttgcctgtttgtacactgtcatgatgaaagcgccgctatgtgccgcttgaaaaatgtcggtgttgccatcgcagaaaaaatgacagctctctatcctttctaatcctccgcggcagaactgtctctgagaaatttttgcatgctcaaggttcctgcggcttttaatcggctagttgcaataactgtcgggtataaggctgcgccggtgcggtgagtacccgttggcaatccccttgttctatcacttctccctgtttcagtacgatcagctggtggcacagtgatttcactacctgcaaatcgtggctgataaacagatagcttaattgataccgttgctgaagcgatttgagtagcgccagaatctgtgcctgcaccgatttatccagcgatgaggttggttcatcgagaatcaatagctgaggctgcaatatcagcgctctggcaatggcaatgcgttgacgttgcccgccggaaaactcagtgggatagcggtggcgagtggtcgggtctaatcccacttcttccatggcggcaatcacacgctgttcccgctcggcggcgctgagcttctgatgaacctccagcccttcagcgataatttgccagaccgccagacggggattgagcgccgagtaaggatcctgaaataccacctgaatacggctgcggaaaggcagcatctgcttgttattaaagctatgtagtggttgaccgtcgaaacagatctccccgctggacggtaataaacgcagcaatgccagcccagtggtgctttttcccgatcctgactcgccgaccaaaccgagactttcccccggacgtaaatcaaagctgatacctttcaccgcgtagtgatggccaaccgttcgacgcagtaacccttttttgataggaaaacctacctgaagatttttgacgcgcagcaggggcgctgccatcggcggtagcggtattggctcgccttgaggctcggcgtcgagcaattgccgtgtgtatgggtgctgagggtgactaaacagcgtctggcggtcactcagctccactctgcgcccttcgcgcatcaccgccacgttatcggccagacggcgcacgatattcaggttatgagtgataaacagcaaactcattcccatttcttgctttaactctttcagcaaacttaaaatctgcgcctgtaccgacacgtcgagggcggtagtgggttcatcagcaatcaacagcttaggctgggtgagtaccgccatagcgatcatcactcgttgctgttcgcccccggaaagttgatgagggaaatctccgagccgccctttggcatggcgaataccgacgcgatccagacagctgataatctctgcacgcgcgctttcccgccccattccgcggtggagggacaacacttccgccagctgtttttcgatagtatgcagcggattcagcgagaccatgggttcctgaaaaatcatagcgatctggttaccgcgaattttgcgcagcgtattttcatcggcatggagcagcgattgaccggaaaatagaatgtctccgctcggataaaccaccggcggtgaaggtagtaaacgaagtaccgacagggcggtgacgctcttgcccgatccggattcgccgaccagtgccagagtttcaccggcttctacctgcagggaaagctggctgacaacctgacgttcctgttggttctggcggaaagcaatactgagatcctgaatatccagcagaggagtcgccatatcaatacgccttacttgggtcgaaagcgtcacgcaccgcttcgccgatgaaaattaatagggaaagcagcatcgccaacgcgataaatgcggttaatcctaaccaaggggcttgcagattgtttttcccttccaacaagagccctcccaacgatggtgagccgatcggcaggccaaatccgagaaaatccagtgaggttagcgtggtaatagacccacaaagaataaacggcaggaatgtcagagttgctaccatcgcatttggtagcatatggcgcgacataatcacccgatcgcgcacgcccatcgcgcgggctgcccgaatataatcgtagttgcgggcacgtaaaaactcggcgcgcaccacgccaaccagcgccatccagccgaataaaacggtaatcgccagcagccaccagaaattgggttgaataatgctggacagcaaaatcactaaaaataacgttggcatacctgaccaaacttcaataaatcgttgcccccataaatcgatttttccaccgtaatagccctgcaccgccccgacgcaaatgcctatcacgctggaaaatagcgtcagggttatgccaaacagcatggaaatacgaaagccatagataaccttagccaatacgtcaccgccgttgctgtccgtgcctaataaattgtggcgatcgggcggagaagggaagggaacctgcgtggagaagtttatggtgttattaccaaagcgaatcggcgcccatattgcccagccgtggtcttcgatacggcctattacgtaagggtcttgatagtcggcggcggtagttagaataccgccaaaggcggtttcatcgtagttcaccataaagggcatatagagtttgccctgatagctgaccagcaggggcttatcgttagcaataagttctgcgaataaactgatgataaacagcgtcaaaaaaatccacagtgaccaataaccgcgtcggttgtgtttgaaacgcgcccaacgggcacgattgatggcgctgagtggtttcattggcggccctcgaaatcaatgcgtgggtcaaccagcgtgtacgtaatgtcactgataatattcagtaataagccaattagcgtgaaaatatacagagtgccaaacatgaccggataatctcgttgtagcgtggcgtcgtagcccaataggcccagaccattcagagaaaacatcacttctatcaatagtgaaccggtgaagaacatactgataaaggtggcggggaaaccggcgataactaataacatcgcattgcggaacacgtgacgatacagaattttatcttcgctcaaacctttggcgcgagcggttaccacgtactgctttcgaatttcatccagaaaggaattcttggtcaacatggtcagagtcgcaaagccgccgatcacggtagccagcaccggcagtgtgatatgccacagataatcagtaatcttcccgtaccaaggtagggtatcaaaattactggataccaggccgcgcagcgggaaccaatcgaaataactaccgccggcaaataccacgatcagcaaaatagcgaacaggaaggagggaatggcataaccgataataattagcgtgctgctccaagtatcgaaggccgatccgctgcgcaccgcttttttaattcccaacggaatggataccaggtaaataatcagggtgctccataaccccagggttatcgacacgggcaggctgctttttatcaaccccatcacggtttcgccgcgaaacaggctgtcgccaaaatcaaagcgggcatagcgccagagcatatcgaaataacgttcatgcagaggcttatcgaaaccgaagcgctgtttaatttccgctatgacttctgggtcgagtccgcgtgagccgcgatattgtccttcccctaatggcccggcgttcacgccgactttcgcgccgcccagattcccgtctgaagcactgttcaaaccgctgtgctggccaaattcgatattagctatggcctgatccaccggcccgccgggagcgatttgcacaataaagaaattgatagtgatgatcgcccacagcgttgggataaccaataataaacgacgtaataaataagcgcccatatgttgctccttagcgccgttcagccggcaaatgagccgctttatttacgtcgaaccaccagctatcaaagcccagagaataggttgggcgcaccgcaggcatagagaatttatcccaataagcaaaacgggtgtgattggaataccacataggaatcataaagttattccatgtcagcactcgatccagcgcgcgaccaagggagagtagggcctccggttgcccctgatggctaataatttgctgaatcagagaatcaatagccggatcgctgacgcccggacggttatacgtagaatcaatatattctgagctccaatatagccgcagataagtgcttgggtaagtgaaggcgggataaaccgccgggagcatatcgaaatcgcggctgcgcaggcggctaaggtactgtgaactatctacctcgcgaatattcatggtgatgcccaaacgttgcaggttatgtttgaacggcagcacgtattggaaattgctgccgctgagtaacagcatttcgaagacaaaaggttgccccgttttgctattaatcaaccgctggtttttcacttcccagccggcttgctgcaagagttcgcgcgctttcagcaggttatcccgatcgttgccactaccgtcgctggaaggtggttgatagattttgctgaaaacttcgtcgggtatcttgccttttagcggtgctagccaggctaattccgcgctatcgggataaccggtagccgcatagtcggtattttggaaaaaactgttggtgcgttggtaactgttgaaatagaaagctttattcatccagtcgaaatcaaaggctagggtgagcgcctgacgtacgcgccgatcgctaaatagcggacgttggatattaaaagccatccaacgggtattttgtgccgatttatcctctaaatcctgcttaatgatgtagtttttggcgaaattgctaccaacatactgcgatgcccagcttttgggcgacgtttcttcccgcaggtcaaaggcaccggatttaaaggcttccagtgcgactttatcgtctaaataataatcgtaacggatggagtcaaaattatacattccgcgattgacgggcaaattggccgcccaatagtcgcgcactcgttgataggtaatatattggccaatgcggtaatcgccaatgcggtaagggccgctgcctagcggcggcttgcttaacggctctcccagtttacggttctgccagtcgtgcgcgggtaaaaccggcagccccaacatactcagcaacttatctttacccggctctgggaactcaatgcgcaccgtcaggcgggaaatggctttaaccttcacgtctttataagcgatgcgaaattgaggaacgccttcggtcattaacttattaaaggtaaattcgacgtcgttggcggtaataggaacattgtcgtggaagcgagcgtgagggttgatatcaatttcgacccagcgcatatccgcagggtagcgagcagattcggcaatcagcggataatagctgccgatttcatcgtcagagctggtaaacaggctatcgtacaggcgttcaaagccaaccgcaggcacgccgcgtagggcaaagcggttaaagttatcaaaggtgccaatggcggacagcgtaatattgccgcctttgggtgccgccggattaacataatcaaaatgagtgaaatcagcggaatattttggctcgcccaaaattgagaatgccacgccttcgtttagcgtttctgcatgcaatcctagactgaaagtagcaaatattagtgcggtgaatgcccgtaatagcatgataacggtgaacccctgcgacaaacctacatagcaactgtttcaagtaaaactaccagctgtccgggtacgaaggcaaacattaaagaaatttgttttcattacaaaacttcagcaatttctccagcgttaacggcctgctgagtaaataaccttgcaggaagtgaacgccgtgagcaatcagatattgtgcctgttgctcggtctcaattccttcggccacggtttcaattttcaaattcttcgccagtatcaatacggagtctaaaacgggcgcggtaagggtttcaaatccgatattattgataaatgcccgatcgatcttaatatagtctagcgtgaagcgttccagataaattagcgcgctgtgtccggtaccaaaatcatctacggcaattttcacgccgtgctcacgcagccaggcgaattgggaaatagcttgttcttcttctaccatcccacgttcggttatttcaaatatagggtcgaaggtatctaagggtaaccgcgctaacaaacttaaaacatcctcacggaatgtcggctcacctaaatgaagtggtgaaatattaaacgccagtttggtgccggtgggaatggaaccaaccattctggccgcatccgcaataattaaatcaaacaaatgctgggttagttgttgtatcaaaccctgagtttcgacaacgggaataaacaaatccggcggaatacgaccctcagtcgggtgctcccaacgcaccagcgcttccagcccggacattttacggctggttgcttcgaataccggttgatattcgataaagaattcaccgcgcttcataccgcgcagaatctcggcctcggggttttggcggttggacataatgtaataggcagaaattccgacaaaggcggccaataataatccgccaagtaaaattatccgaatatcactggctgtgaaattgacgctatacaatagtaacttgatgggataacccggaatctggatctcgcgagaggctgtgtcgggcagttgttcaattggaatgactttggcattaaaggttgtcacggcctggttgccaataataatcgccataccgttgacgcccttatcattaaagttaagcaataaataaggacgcaggtttaactctaaagttgtcaatacgccggtatttccgcggccaggctgacgtagccaaacggcgaccgccggtttatctggcagaataggcgtaccctgctgaagcttgaaatccagagtctggtataaattaagttttgggtaaatagcgttactgctgacatgcatttcgccggtagccgacgagcaataagtgaaaccatttcgtaccagtaagaatgtccgcacgccgttcgtaaacgctgccttatattgcagtgcaggctccgctaacttgcaggatttctccgttaatggaatcagctgagacatggtggtggttaagtcatttaagaaatgcgaggagtaagcgactatttgctcgctctgggcagataatcttttctcactgttacgataaagaaaagacagagtaacggtaacaaaacaaataaagaatatcagagaaatagtggcactttttttaatcaggcggcgcggggatacaatattgcgaaagaacgcattttttgaacccatgataacgcgactccctgacccgatgaaaaaagtaattataagtataaatatcttagcggtgaagcgctactggtttggtattagcctcgatgcttcagagctgatattagactaataaataaaatttaatattttaaactgacttaatggcaaaaatgtattaaatagacttaataatgtctaactttaattattaatatgatttttacctaagctaagttggaacaatatgctgcggttggtttaatcaacatcaaacaaggaaacagagtaagccttagctgtttctcgtcggcgattctacaagagaatgagggattgtgaaccccattgagcagaaaaaggacgtttcctacagcataagggaactaatctgaaggcgttgcaggttcaacagcaaaaaacgctgcgacaagggcagcgttttatcacttcgtttggcatttctgagcaagcagggaactgtctcaattagctttgcgtgcggttactcagtacgcggcggccatcttgataacgcttattccagtaagtatcggtcaggttcgaaattgtcacaccgacactggtcgaagcgtggacaaatttatcgttacccagataaatacctacatggcgtcctgtcgaacctgcgcggaacagcacaagatcaccggggcgcagttttgtacgctggatttttttaccaatatcctgctgctctgaggttgagcgcggtaaatccatgccaaattgttcgcggaaagtcagttgtacaaaagcggaacaatcaataccgcgtttgctgctgccgcctaagcgatagcgaacccctttccaacctgcgtactgttctaaaatctttgacttgatgtcaacgttgcgaaccatcgcttcgaattcatcctgagaggcttgcagtaaaagaccgtttttatcattaactgcacgcatctcagtttgcgtattttgtagattcgaagcgttgttcgagctacacgcggataacatgaccgcggcagctactgcaggtattaaccgcagaatgtatctcataataggttgagacttgaccattgttattgttttcccttgctgtccttacgacggatatcgccactaaaaaatgccaaacgaagtgagactagggttcacacatcgatcagacaataacttaaacgaataaatgtgcagagacgcacaatttttattggattaagcgcaaaatgctgatattcgagcgcaaactttttcgaggttaccggattgacttataaaaggcgagtatttttgcacagattcttataagaaatcctgatgtaacataatgttatattttattccttactcgattagcaatcagatacatcaaaaaccagtttaacttattgttttaaaggtaaataactggcttatcattgctctcctcgtcatgacgaacttttgtacactaatatagctctctaaaaattatgcatgaatatgtaccaaaacaatttgggcaagggaaaagtaaatcatgaccagcaaggcatttaacttgtaaacaaaagcaggtctttttgggagtattcctaatttattgcctctggaggtatctgacgaatcttctatttgcgcattgcgtgcattgtttatcctgatatgggtaacctgatatagataaatagcgctgagtatccttggaaggatatgtgcgttctaatggctaattaggctgtcagtaaaagtgtaatgtgatttgtgtcacccttttagggtttaataaccacttaatcaacttcagtcataaccgtggttatctgcgcaggttgcagtttttctatcaccttgtttcagcgctcaacggtttaatatttggaatatgataacgaacatattggtttatctttaaggcgatcgatgcgattttcgtcgaaatagcggttctaaaatagaagaaatttttaattcgactcctttctaactttgttgttctttgcactgctctaccaaataaaaaatgtaccgttgagctggggaaatgtcttgcggtttgggtgtgactcgcagtgaatttgtcaccaacgctggtagccatggtggggaagatactttggtcaaggtgattaattttttcgaaaagaatcaatccattaattaaccaaccgagagccgtatgctgtcacataatcaaaccttaaaacgtcaagatgatctccataaattgctgaaggatcactactcgttatttattcaagggattagcgagacacggcacatttctcctcgtacagtgcgacggaatatccgctccctggtcataaagtatccgaacattaacaggttctatggtcgggttgctatagatgcatgtgtccctggaagattttcctcagagtcaaatcatccttattaggggaaatatagggaatagctgcgagtttacctatggggaagaaaccatctggtaaattggccgctataagtttgatgtgtcttttatttcaaacgagcactttgacttggtacacggagtttccgtgccccgtcttgataacgtaagaatgaagcagcagctaatgctttgttcagaaaaaagttatttgattgcagaagggattaagttcaataagttctcattccataaggttgccgatttgacgcagtttgacggcgtgataaccgatggcgctattccaaaaaagacgattgatatgtcgatcagcaaaaatacggaaatagatttaatcgagatctaacggggagcggcgactccccgtggcgtggaaatacgtatcagagccgtggacgctgtgcgctcggcagacgttgatttatccagtcaatgattcgatcgctggctggcgtgagtaatatccaactggcaccgaccaatacaacggaaagcgcgccgacggcaatatcagtaaaccaatgggcgccgatcattattcttggcagagagaacacgatggcgataatcaacgcaatggcaaaagccccgcgtgagaaatagcgcagcatgaagcaggcgaatatgattaacatcatgccatggtcgccggggaagctatcgctggaggcgtctttggttgggataccaataagctcgctaacgcggttgatattctcaaataccagcgtcgggcttgggcgtttaaccggtaataaatgtccgagctggttaagaaatacggccgtcagtaacatcacaaaacccattacgattaaacgacggcgtcctgccggattttcttttaagaaaaaatacatgtacagcgtgcccatgcacagcagagaaataacgtcgaaggcacggttattggttaccgccaccacatgtaggaaggttgggctggaaagcaggcgctcattgaagtaatggaaaatggcggaatcggggccgaaccaccaaccatgattttcaggtaagtaccaggataggaacagggctatacccaataggttgagcatcaagattgtcggtaaattgcggcgggtcatgcgaaggcctatatataattagatgtttaaaacagtaacgcagataaaaatacgtcgggcattatacctacttatgtaaacgaatattcaacaaattgccctgtagcttattccagtcgttgtctccggaagaaatcacttcaattcgactgtctggcggcggagtggggcgggtctcaatttgtaaatcatttccctgccgattaaccaccaacgcgccttcgggaatacgcatcacgcctttaacacgttctaccggactcaaacgaacccattcaagcaacggcacggtgtcaaatatcgcctcgctgttaaatacccaaccgcagctagtataaccttgcccctggttaagcgctctgcgccagggttcgctaccgttcaggtttaatgcagccaggcctttttttggggatgattctccgtgatgatggcgtgcatccggcagttgggtcttattggtatgcagaatatccaatacggaaatagctatttttcccgaatcagagaaatatagcggacgctgcgaattctgagcttgctgccattttgccaatgcctgacggtcggtatcgatataagtatcttgcttactggcaataatgacatccgctgcggctagctggtcgcggaaattctcgttttcagtgtagcgttcatcatgtaattggcgggcatccagcaggcacagcgtggcgctaagactaatccagggctgataaatatcggcggttaacagagacaaaatttgctttggatgacccaaaccggtgggttcgattaataaccgatccggtttggcctgctgtagcagcatattcaatcccacttgcataggtaaaccattcacgcagcacatacagccgccggggatttcttttagtatcgcgccactatcggataataacgcgccatcgatgccaatttctccaaactcattaactagcaccgcccatttttcatgttcgggtttttgcgccaataactggcgaatcagggtggttttaccgctgccaagaaaaccggtaatcagattggtttttgtcaccacatgctcccagtaaaaaaacgttgcgttaagcataccgaaaaataaaggcagcggaactgtcacatcatgcgcttaaaaatataatttattaagtagcttaataatcaatcagttattaagacaactcttaatgcagagcctgaataggctaacgactgacgttgataatttaactattttaatgggttatgcgccgattaaggtagtaaataatgccttatcaacaccattgttttgagcgaaatcctctactctttaattgagtcttagcggattttgaggtgaacatgggtcaatatcgagtactcagcgtcgcactggttttattttcatggaccgcattggcttatggcacagccaccagcggtatcgttcgctttactggctccattgtagatgcaccctgccagattgatttttctgcacaaactctggcaacccgatgttatagcaacggaaaaaacctttctcaacgtcaagttatcacgacgggcatgaacacaacttccaacttaccggggaatctgggcacttcagaagttcaatggctgaataaagaacgcaatctggctattgtcaccattaattatcgctgaaagaatagctattgctaaaagaacagtcgtagctaaaagaataattatctctgacaaaccaacgcttatccattcaacgctagcagcccgatttaattaaatcgggctaatctgtagcataattctttgcctttctgtgagcctctgcgcagctctgccgatttttctgtcggaccagatgttatacttccagtcacatatagggatattatcggttaaacccacctttttggtcaggccaattcagcttggtactgttaaacaggctagattcaggtaataaaataatgcgtttataccaagaagtcggcgggaaactgcgcgatgcactgaatgcgggtgaatatatcgcaggcgatcgcctaccgccagagcgagatattgcagaaacatttcaggtcagccgcagtgtggtgcgggaagcgctcattatgcttgagctggaacaacgggtggaagtccggaaaggctcgggcgtgtatgtgcttagcaaaccagaaaaaaatgctgatgatgagcagcccgaaattattgatagtgggtatggaccgtttgaattgctacaggccaggcaactgctggaaagtgaagttgccgcttttgctgcattgcaggccaccaaggccgatattctcaaaatgcggcaggcgatagagcaggaaaggctgtcgctagaagccggacaaatagatgaaagtgccgatgagctttttcataatcttctggcgcaatcgacacaaaatagcgtattggccagtatggtgcgggaagcttggcaggcgagggataccagcgtgatgtggcagggcgttcacctgcacgttgccgatttcagctaccgttggcaatggctggaggatcatcaaaagatcttgcaagcggtgttacggcgggacagcaaggcggccaaacaggctatgtggcagcatttggaaaacgtgaagaatattttgttagaaatttccgattccgatcatcctgattttgacggttttttgtttgaatcggtgccaacattatcagataacggataaataacgggcagggataagttggggatagatggtgtgaataaaattaatagcgcggctaaacaatagcggctaaacaataaatgggaatgctttgcgacaatgccactgatcgccttagacggccagtggcattggattgatcaggctttctctaacaggacgcgcaccgtttctttggcgccattttgttgtaactgaacataagcctgagtgacggcagcgacaaattcagcccgctgcggcagctcttcgccgaagatgctttttagtgccagcaaagcctgcactcgttctgcgccgtctctggtttccgcgacgcaggctttaaaactttccagcattggatcgcgaatatcaatttcctgacctgcatcgtcaataccgccgacataacgcatccagcctgcaatgcccagcgccagacaggcgtaaggtccgccgtttttcagatgccaacgcacggaatccagcattcgctgcggcagtttttggctgccgtccatcgcgatttgccaggtgcggtgtttcagcgaaggattgcggtaacgttcgataaggctatctgcatatgcacctagatcggtattttcgacgctaagcgttggtgcctgttctgccatcatcaactgacgagcggcacgcacatagttggcatcggtcatacaatcgctaatatgttgataacccgccagataacctaagtaagccaagaaagaatggctgccgttcagcatgcgcaatttcatttcttcaaagggcagtacatcagccactaactgagcgccgacggcctgccagtttgggtgtccggcaacaaatttatcttcgataacccattgaataaatggctcgcaggctatgccgcagggatcggctacgcccagttcggcggcgatttcatgcagcgtttcattggttgcggccggtacgatgcgatccaccatggtattggggaaagtgacgttctggcggatccattcggccagttccggatcgcgaacggcggcgaggctcagtaccgtactgcgagccacatcgccattttctggaatgttatcgcaagaaagtacggtgaaaggcggcaaaccgcgtaaacgacgcaggcgcagcgcttcaaccagcacgccgggtgcagaggttggcgcttccggtacggccagatcggcctgaaccatcggatgattgagatctaactgaccgctgccgggttcaatgcagtagcctttttcagtgatagtcagggagacaatggcgacctggggttcagccaatttatccaacaccgccatgataccgtctaaacgggcatgcagagattcgcgtactgcgccaaccactatggcctgattgccttcggcacctttttccagcacggaatacagatggtcttgcttacgtaagtcctgaatcagggtatccccgccgaacagactgacttcacaaatcccccagtcaccgcccagctgattcagcacccgatcggtcaataacgcctgatgagcgcgatggaaggcaccgaaacccaggtgaacgatacggcttttcaactggctacgatcgtaagtcggaaggcggacggcgccgggaagcgggctattggcaagggtcttcatacataagctccagaatggtttaccttcccaaatgttcgcctgagcgtctgggaaccggtatcaaatataggcaagctggaaaggtgttggaccagtttggtaagtctgcttctctgggctaaccctctctatcagggagaggtttttccgctgcttgtcatgattagcggcttgcagtgtaaagcgatatgatagaaattaaaattggttagtccaaaattggtcatattcgtgaggtggatcaaccaatatacttttgctttttgacactttttcactaaagagtaaggttaaagctgagtgatatctattgataatcggtataacaacatttcggtaaaaggttagatacgtgaaattatgaccgcttggataccggattgagctttagatgatgaataaccgtgaaaaagaagacagtttgactcccgcatcgcagttattgccgatggtgcagtaacacggggtaattcaatgatgacaatgacgcaggtgagaaggtaaagcagatggaacaaacatggcgttggtatggcccgaatgacccagtttcgctggatgacatccgtcaggctggggcaacaggcgtagtaactgcactgcaccatattccaaacggcgaagtgtggccggtggaagaaattaaacaacgtcaggcagaactggcggcgaaaagtctggtgtggtcggtagtagaaagtgtgccggtacatgaagagatcaaaactcattcaggtgaagtcgataggcacattgccaactaccagcagacgctgcggaatctggctgcctgcggtatcgataccgtgtgttacaacttcatgccggtgctggactggactcgtaccgatctggaatacacgctgccagacggttctaaagcgctgcgttttgaccagattgcctttgtaaccttcgaactacacattctgaaacgtccgggcgcggctaaagactatacggcggaagaacaggcgcaggcagcggattatttcgattcgatgaccgaggcggaaattgcccggctgaccggcaatattattgcgggtctaccgggagccgaagaaggctatactctggaccagttccgcgctcgtctggctgaatacgacggcatcgacaaagccaaattgcgtgagaatatggcctatttcctgcgtgcaattgtgccggtggcggagcaggtaggtttacgtatggcggtgcatccggacgatcctccgcgtccgattcttggcctgccgcgcattgtttccaccattgaagatatgcagtggctgaaagagaccgtagacagtattcacaacggttttaccatgtgcaccggttcctacggcgtgcgggcggataacgatctggtcaagatgatcgaaacctttggcgatcgcattcatttcacgcatttgcgttcaacctgtcgtgaaggtaatccgaaaaccttccacgaaggcggacatttgcagggcgacgtagatatgtatgaagtcgtgaaggcgattctgacggaagaacagcgccgtcagcgagcaggggatcggcgtcctattccgatgcgtccggatcacggccaccaaatgctggatgatttgcacaagaaaaccaatccgggctactcggcaattgggcgtttgaaaggtttggctgaagtgcgcggcttagagttagcgctgaagcgagcgtttttccctgaattgcgttaattcagtgaaatgatggttagtggaataatgatggttaagggccggttttaccggctcttaacgttgaatcagcaaagattaatctgcgcgccccatataacggcgttctgcgatatgaatgcggattttctcacccgggctgatgtactcgggcacctgaattgacaggccggtactcatgattgccggtttgttacgagcactggctgaagcgcccttgatgctcggcgcggtttccacaatttccatatcgaccgtctgcggcaattcgagcgccagcaactggccttccatcgtcaatacttgcattcccggcataccaccttcaggaataaacagcagttcttcttcgatctgctcttttttgaagttgtacggcgtatagtcttcttcatccataaagacatattcgtcgccgtcaatataagagaagttgaccgcgcggcgggttagagtgatggtgtcgagaatatcatcgcccttaaaacgctcttccactttcaaaccggtacgcacgtctgaaaaacgcattttgtataaagtactcgcaccacgggcgcttgggctttgtacatcaatatctttcaccaacagcaatttgccgttgtagttgactgccataccgcgcttaatttcgttagctcttgccataaaaataacctgccaatcaggattgaagataagttgcgacaaattacccgtgctgcgggctacaggcaagcagatagcgtaaaaagaatgaggaaaaagcgcgaaaacctggcttggaacaagcaatgattcgatggcggattattgcgggaaaaagaatgtgccgccggagaggaattggcccggcggcgcagaagattggaacctattgatagaccggcagtaagcccattaatgcacagatatgagccacggcgttaatcaggccaaaggcgatgataaagccgatcatcaggctgccgcccggtgctcggtaagtggcctgcgggaagcggcggcgagttgcgcgcgccatcagtgccggaacaataacggcccaaatagtggcggccagaccggcaaaaccaatggcgtacaggaaaccattcggaaacagtaaggcaccgatggtgggtggcacaaaggtcactaacgctgattttgcccggccaatgccgtcatcggcgaatttaaagaaatcggcgatatagtcgaacagtcccagtgataccccgaggaaggaactggccagcgccatataggagaaggcattcagcaattgaccggtcaatgggcctgcggaaaccgtatccatctgttttaacaggctgccaatgttgccgccgtcggcaatcaccagtttgaaagcatcgcgcgcgatgttgccctgaatcacatactgccacaggatataaatcgccagagcaatcagcgtgccgaataacagactgcgcaccacggatttactgtctttgcgataatacttcaccaaaccgggcacgttgccgtgatagccaaatgaggtcagcagataaggcagagccgcgagcgcgtagggcagatagctggcgtcgctttggctatggttaaacagtacgtcggcttttacatgggtatacatatcaccaacggacataacgaatgtgattaccatcccgccaatcaatatggtactcaaacggtctaccgcgcgagtagataaccaaacgataaaggccaccagcaccgcgaagactaagcctgacgtggtttgccccacgccgataatgccgtccagagtgtgggcgataatggagccacccgccgagatataggcgtaagtcaggatatacagcacaaaggtaatggacaggccgttgattgagctccacatgcgccccagcaagtcctgcaccaccgtatggaaactggcgccagtcgggtagttgaggttagcttccaggatcatcaggccggaaatcagcatacatgcccaagtgtagatcagcagcgcgacagaaccgctaaaccaaacgccggcggtcacgataggaatagagaacattcctgcgccgacggcggtacctgctacgatcatcgcgccgccgagaaccgacggacgggatagggactgagtagagtccattgacatgcattgctcctgaaagacccgctgagggtaaggttcttttgtactagctcaatggtacagtggtggcggggcgctgtaaatagctgaatatacttagactgaataattagccggttaatacttcggccatcagcgtcattaatatcgctatatgatgcttatagtttagactttggttaaataatcgacaggtcgattgagtgattcatctcagttattgaggcggaatcatccgggggaaggatagtgctggtagttattgacggcgattgctattgtccgccatctactctgccagcccaccggagaatcactgatggactgtcgctcagattgcggtgcttgttgtattgccccctcgatttccagccccattccgggtatgcctttcggcaaatctgccaatacccgttgtattcatttagccattgatatgcgttgcgccattttccactctccgcagcggcctaaagtgtgtgccagcctgcaggctcgacgggatatgtgttttacccaccgcgatgaggctttggtgtatctgattcagttggaagccgccaccgcgccataatgggcaatagcgcctggttttgggcataaaaaaggcgatattgaatatcgcctttcatgttttatctgcggagccagaggtacatcctctggcttcatgttgtcaccattaagcgccttctggcaccgcatgtgcggtattttttagcacctgaccggtatatttctcaatttccaactgcgccatctggccacagttaccctgagccagactggatgagccgatatcgaaagtcaggcagttgatattgccgtttttacagatagagcccggttccgccggttctgccggatcgaaccacgctccctcactgacgcgaatcacgcccggacgaacgtcttcggtcaccactgcgcccaccaggatctgaccgcgatcgttaaaggcacgaaccagatcgccgttggtaataccgcgtgcgctagcatcctgcgggttgatcagaatagcttcacgatcggctaccgcatattttttccgcagcggggtgttatccaactgggagtgcaaccggttgatcggatgagcggtattgagcgacaacgggtattttttcgcttccggcccgcgataccactcgtatggcggcatccaggtaggaattccccgacaatcggcataacccattttggcaatggtatctgaataaatctcgatcttgccggatggcgtccccagcgggtttaacagtggattttcccgataatcggcaaaacgaatccattgtttattggcctctggaatcgggaagcgaacgtagttattcgactgccagaacatatcaaacggcggcagagcgactcgcgccgttctggcctgagatttcatatcgtcgtacatggatttgagccactgggtttcgtctttgccgtcggtaaaggcatcgagaacgcccagtctggcggccatggcagcgaagatatcaaaatcgttacgagattcatgctgcggcggtacgcattgatgcatcgggaaaacatacagttgcgagtaatcgccgcccatttccagatcgttacgttcgtagctggtggtggcaggtagcacgatgtcggcgtacttggcggttgcggtccagtaaggttcgttcaccacgatggtttccggatgctgccaggctttgatcagcttattggtatcctgatgctggtggaaggtgttaccgccagccacgtagaccattttcacatcgggataagttaccttggtgccattaaaatcaatggttttacctggattagccagacattccgcaatacgcgccaccggaattggagccggtgagttcttcggcgcattaccggcggaaatccccggtaaaatgccgcctttggccgttgggctaccgccggaagagtagtgatagctgaaaccgaacccgccgcccggcaggccgatttggccgagcattgccgccacggtcaccagcaaccagtgctgttgttctccgtgatgctgacgctgaatgccccagccgcccatgatcatggtgcgctgtttggccatatcccgcgctagctgacgcagaacttcagcatctacgccactgatatcagcggcccattcggcatttttcggttgaccgtcattttcacctaacaggtaggactggaatttatcaaagccgacggtgtaggtcttaacgaagtccgggtcatacaatttttcagtcaataaggtatgggcgataccgatcagcatcgcgctatcggtataagggcgcggagcgatccattgagcgttagtgaatttggcgctgtcgttatacaccggatcgatgctgataactttggtgccttttttcttcagcgcttcaaaaccggtctggcccacgtgatccggaatgttccagctattttttagcgtgatcatcgggttacaaccccacaggatcactagctcgctgttttctaccacgtttggccaggcggtttgctgctcgtaaacctccatagagccgacgacgtgggacataatcacttgcgcggcgccggtagaatagtcaccggcatagccgaggaaaccgccggtcaggttcatcaggcgttgtaacagggtgcggctgttgtgcagcattcccacgcttttccagccgtaagaaccggcgtacagtgcctgcgggccgtgatctttctgtacgcgggtaatttcgccacacaccagttcaatcgctttatcccaactgacacgaacccactcatcgcggccacgtagctcagtacggctacccggcccgccttccagccagcttttacgcaccataggatatttgatgcggttttccgcgtgcacctgataaggtgccatggtgatcagatcgttagggtagggatcgtcttttaccggctgaacggcgaccatacggccattttcgacaatagcttcaaacgcaccccagtgagcgccggtcagaatgcctttctgtgcctggcgcaatgccaaaaattgaggcaacgcctggctaatagcctctgccagcgcagatttaggccacaggccggccactaaaggtaacgccgctaacgcgctggtgcccatcaggaaacggcggcggctcatttgtaacggtttttgttcgtatttgctcattttcgcctctcgtttacgacttggccggcatatcactggcatgtttttgtacgtattgtgtcagtacgcgtagctgttcctgagtcagggaagtacgcggtgccatgcctttaatcacgccaatccactggttagcattgaaacgatccagtgcagtcaaaccgtggcaaccggtgcagttggaagacatcatatcggcggcgtagcgccagattttttgttgatcgtcaaccagctgtttcttcggtaaccagacttgtagcgccacctgatgccagatcagaccggtttcagcatcggtttgtgaggacgtggttttcagcgctttctgcgcttcttcgcccagtaatacgctgaggatgcgtttaccctgagcagcgtagaagacttccgctacgccatcttgctgccagccttccacgtcgactagcacctgatcgccttgctgtttcacgaccttaacttcggtagatggcatcagattaccggcgttatggctgtcacccgcctgcataaagaaaggttcggtggcaatggtgtataacgtggttgcgtcagccggtgtttgtgctgcggcggtggctagctcggcagccccagcttgagtcagctcgctcatatccggcaggatgtgggccacgcctttgtggcaatcaatacaggtttccccgtttttgatggcgaccggatgctgaacgcgggcttcagcactttgcgcggtgatgtccatggcgtcataattatggcaggagcggcaggtggcggagtcgttctctttgagggttttccacaccgattgcgccatcgccagcttatgggcttcgtacttctctggcgtgctgatggtcccgaccatttcgccgtagatatctttcaccgcccggattttagtccacaggtaatccagtggctcatggggaacgtggcaatcagcacattcggcgcggatgcctttcgggttctggaagtggacgctgccctgatactcggccaaaggctgctgcatggtatggcaggaaacgcagaaggtagtatcactggttttatggaaaacggtggcagtaccagccagaagtgcagcgccaagaatgatgccgatcagtaatagccatagccatccccaccgacgtcgtttaccgagttcagtctgttttttgctcatattacacccatgttatgtgtctaattgttttggtaacgctagattggcgaacgttgggcaagacaaaatccgttgcccataaaaatagtgcgtctattgtaaatggattttttgctgaaaactaaccagatagaggtatttgcaagattagatcaaatttgctgagtataaatacaggaaacgcacaattttttaccaagcatagacaataaatacttgaaatgcttggttatataactttttatatagcgctattttttagttggaagaggtataaaaacggcgagttaaccagagatgaatggcatttttacttgcctcaaagtgtggttcgggcagttcattgggggggcaccaaatccattggctacatttctccggctctttattttccacctcgccgccgggatactcggccagtaaacataccgaaaccgtatgtttgccttcggcctgccaggtggcgatattattggtcagagcaataacctgtggctgctgaatcagcagaccggtttcttcagccacttcccgctgcgcgcactgttcaaaggattcaccagcctctacatgcccgccgggaatcgaccagtagggtgcatgcttaccgcagcgttttcccagtaataccgaaccttgagggttaactatgatgacgccaacgcccacaaccacagccatattttttctccatcagcaaatcgtcagcaaagtatgccatttctgccttaaaccctaccagtgaaagcgtctccagaggtaaaatgtgcgtgacatcaaaaatctgctatgacaattcgaagaaaacttgcataaacccaaatgtagaaacacactattgaaacgtttcagcgttatctgcttcactgggtgataaagggtaacgctcctttttctcataaaagctgaaacgattcaatttcagtaagagaggagacttatgttccagttgtcactgaaggatatccatttggctgccaacgcggccgataaaaacgaagccatcaagcaggtagccgcagcgctgaccgacgccggttgtgtcgatgccgcctatgttgatgggatgctacagcgcgagctgcaaacttctacttacttgggtaacggtatcgccattcctcacggcaccaccgatacccgcgatctggtgcgcaacacaggcgtgcaggtatttcagtttccgcagggtatcgcttggggcgaagatcaaaccgcttatatcgtcataggtatcgcggcgcgttccgatgagcatctggcgctgctacgccagctgactcacgtactgagtgacgatacggtagcggctcagttggcaaaaacgacctcaccagaggaattgtgcagcctgttgatgggtgagaaaaaagcggctgaattccatttcgatacttcattaatcgccctggacatagcggcagataacctgattacccttcaggcgctgaacgccggtcgtttacagcaaattggtgcggttgatgccagcttcgttagcgatgtgattactcgttcgccgctgaatctggggcaggggatctggctgagcgacagcagcgaaggcaatctggtcagtgcggcaaccctcagccgtccggcggtgccttttgagcataacggtgaaaaagtggcgctgttgctgacgctgtccgtagccgaccaacagccgctgaacatgctgaattatttaagtgatttactgttggcgaaaaaagctgacgccttgctgaacgccgatgccgccaccgtgctggcattgctgaccagcgaatatgtagaacagagtcaggtgttaagcgcggagtttgtcatccgcaacgaacatgggctgcatgcgcgcccagggacaatgttagtgaatacaatcaaacagtttaccagtgaaattaccgttaccaatctggacggcacaggtaaaccggcaaatggacgtagtctgatgaaagttgtggcattgggtgtgaaaaaagggaatcgtctgcgctttaccgccagcggtgaagatgcgcaggctgcgctggatgccattggcaccgcgatctcagccggtcttggggagggcgcagcatgagcagaagagtcgcgactatcaccctaaatccagcctacgacctggtcggtttttgcccagaaattgaacgtggcgaagtgaatctggtaaaaactgccggtctgcacgccgccggtaaaggcattaacgttgccaaggtactgaaagatttaggtatcgacgttaccgtgggcggtttcctcggtaaagacaatcaggatggattccagcatttattcagcaatttaggtatcgctaaccgttttcaggtagtgccggggcgtacccgtattaatgtaaaactgaccgaaaaagacggcgaagtgacagatttcaacttctccggtttcgacgttagcaagcaggattgggatcgttttgtggtggattccctgagctggctgggtcagttcgatatggttgccgtaagcggtagcctgccagcaggcgttaatcccgatgattttaccgattggatgtcgcgcctgcgcagccagtgtccgtgcattatttttgatagcagccgcgaagcgctggttgccggtttgaaagcgtcgccgtggttggtgaaacctaaccgccgcgagttggaaatctgggccggtcgtccgttgcccgctttatctgacgtcgtcgaggccgcacatgccttgcgcgatcagggaattgctcacgtggtgatttctctgggtgcggaaggggcgctgtgggtgaatgcttccggagcctggttggccaagccgcctgcctgtgaagtggttagcaccgtgggtgccggtgactctatggtgggcggtttgatctatggcctgctgatgcgcgaatccagtgaacatacgctgcgattggcaacggcagttgctgctttggccgtcagccagagcaacgttggcgttaccgatcgtccgcagttggccgcaatgatggctcgtgtggatctgaaaccttttaattgatattcggaggcgaaatgaaaacgctactgatactagacagcgcgcatggacaggccagcggccatctggcgacgttaatgctgggcgccgcggccagcaaagccggtcttacatgggttgataaagcggaagacgcggagctggtgattgttaccggttcggcaataccggccgacggcgcattaaacggcaaaaaagtgtatctcggcgacctggctaaagcggttcgcgatccggatgcttttctggcagatgccattgcaaaagcgcaaccttatcaggctagcgttgaagctcctgcggcagcatcagccaaagggccaaaacgtattgtggcggttactgcctgtccaaccggcgtggcgcacacctttatggctgctgaagctattgaaagtgaagctaaaaaacgcggctggtgggtgaaggtcgaaacccgtggctccgtaggcgctggcaatgcgattacgccggaggaagtggcggcggctgatttagtgattgtggcagccgatattgaagtggatctggataaatttgccggtaaaccgatgtatcgcacttctaccggtctggcgttgaagaaaaccgtgcaggaattggataaagctttggttgaggctgaagtgtatcagccgaaatctgccggtagcgccaataccggcgtgaaaaaatctgagggcggtggtgcttatcgccacctgttgaccggtgtttcttacatgctgccgatggtggttgccggtggtttgtgtatcgcgctgtccttcgtattcggtattaaagcctttgaagaaaaagggacgttggctgcggccctgatgcaaatcggtggtggctctgcctttgccctgatggtgccggtattggccggttttattgccttctccatcgctgaccgcccaggtttaacgccgggtctgataggcgggatgctggccgtcagcactggcgccggtttcctcggtgggattatcgccggtttcctcgccggttatgtggctaaagccatcagtaccaaactgcgtttaccgcaaagtatggaggcgcttaagccgatactgattatcccactggtggccagcctgatagttggtttagtgatgatttatgtggtcggtacgccggtggcaaaaatcatgagtggcctgactgcctggctgcaatccatggggacggccaatgcggtgctgctgggagccattctgggtgccatgatgtgtaccgatatgggggggccggtgaacaaagccgcttacgcctttggtgtagcactgctgagctcgtcagtttatgcaccaatggctgccatcatggcagcgggaatggtgccaccactggcaatgggtctggcaactctgctggcacgtcataagttcgacaaaggccagcaggaagggggcaaagcggcgctggtactgggtctgtgctttatctctgaaggtgcgattcccttcgccgctcgcgacccaatgcgtgtgttgccgtgctgtatcgctggtggcgcgctgaccggtgcactttctatggcattcggcgcacaactgatggcacctcacggtggtctgttcgtgctgctgatccctggggcgattcatccggtactgctgtatctggtggcgatcatcgccggtactgttttggccggtggcttgtacgcgatgctgaaacgccctgatgctgcattggtgaaagtggcttaatgcattattagcaacacttaaatagcattaaaataaattatcgataccagtcagttaaccctgactggtatttttttattggaaatatagagttttatatttcagacggttaatttgttactggcccatttattaactcgccgtatgtattgttagtcgaataataaatctgactttgttcagtgtttttgacgtttgatcagaagaatcgcagcccaattcgttatacctcatcacttatttcgtcaccttactacgttttgtttaataaggagggcgggatgaatggctctattgtgttaaacaagcgttagaatttgctgaccattaatgatgaataatacgtcttatcaataaataaggtgttattaccggaacacctgtatcaccgcgccgatgacgtgatttcccgcgatgatctgctcagtacttgccggctggatcgcgtggtttcgccggtattttttccgggtaccatcaaacatattcgcgatgtattgcgcaaaactacctaggctgaagtcattacccaggctgaagtaataaagacgcataaaaggggagagaaagtctatttgagtggattatcggatagcgggcagctgcaatggggtaagaatgccagccagcagtattgggggagcggctctcaacggcgaaaaaggcgctgccgagctgtatctactcagtggagcttgccactacagcaaaatgcccgtcggggttaaacccgcaggcatactttagataatggtgatgactagatttcttcctgtgatttcagccaggcgatttcttccggccagatatccgggttaacggtttccagaatcagcggaatattgtcaaaacgcggatcgcgcataatgtagctgaagacggttttcccgatgttaccttcgcccagactgtggtggcggtcgacccgactgttaaattcgcttttggcatcattcaaatgcattccacgtaaatattcgaaaccgacgatctcacccagcgcggcaaaagtattctgacagtcttcttctgtacgcaaatcatagccagcggcaaaggcgtggcaggtatcaatacatacgccgacgcggcttttatcttctacaccgtcgataatggcggccagatgttcaaatttgaacccgagattactgccctgaccagcggtgttctcgatgacggcagccacgccctgagttgcatccagcgcgatattgatcgattcggcaatgcgcgccagacagcggtcttcatcgatttgcattaaatggctaccggggtgaaagttcagcaaggtcagccccagttgctgacagcgcgtcagctcgtcgatgaaggcttcgcgagatttctccagcgcttccgtgaccgggtggccaaggttaatcaggtaactgtcgtgaggcaaaatatgggcgggactgtagttaaatttctcacaggctcgtttgaatttttcaatcacatcttcaggaagcggagctgcacgccattggcgctgatttttagtaaacagggcaaatgcggtagccccgatttcgttcgcccgaatgacggcttgatctacgccgcccgcagcgctgacatgtgcaccgacaaatttcattcaattctcctttaatcactcgctcattatgacattgataacgacttgattgaatggctgaaggcagattgcggataaaggaataaaaaaccctctgccgaagaccggcagagggtaggatgtgacttcaatggggaaatcagccaagccaatgttgaaccaacagattaatgccaccgccgccgataatcagccagacaaacagcatgagcgccagtaataaaggcttcattccagcctgacgaatcgagccgatatgcgtggtcaaccctagcgcggccatggccattgccagcaaaatagtgtccagcgtaatcaaatggctaacgacggtttctggcagtaaatgcagcgaattgaaaccggccatggcgatgaaaatcaccgcaaaccacggaatggtaatggcacttttttgattctgcgaaccggattctggctggcgactgcggctgagataggctgacagcacgagcaggaaaggagccagcatcataacgcgaatcattttggtgatgactgcggcattttccgcatccgagccgatagcatggccagccgcgacgacctgagccacttcatgaatagttgaaccggcaaaaatcccaaaggtttcctgaccgatcggtagccattggtagtgcagatttagctgataaaaccacggataaatgaaaatgcacaaagtaccgaagatcaccacggttgcgaccgccaccgccactttactggcatcggcttttagcaccggttcggttgccatcaccgccgcagcgccgcaaatactgctaccggcaccaatcagcatcacggtttgctgatccagcccgaaaactttacgacccagccagcaagccagcaggaaggtggagcttaacgtcatcagatcgataagcatgccggttgcacctacgtcagcgacttgctggaaggtcagacgaaagccatacaaaatgatacccagacgtaaaagttgttgttttgccaacagcacgcccggtgaacaagaaggttgtagccagggatacagggtattgcccactaaaataccgaacaatatggctaacgtgagcgcccctaatcccagattgataaaccacggcatatcgcccacgtgaatcgcggcggcggtcagtgctccggttagtaccaatccgggaacaaaacgcatcagtgccgcgggctgcggccgttgtagagtctgaatctggtgagttgccatcgttatctcctacatcctgtaaacacgccgagatagtacaggatgtcagaagattagataaattgattatatggttataacttatttgtataagtggtaaggcgcgcgtttttcaaccggaaaatagataagccgaagtggcctaccccagtttgagcgctttcgttgattaattatcctattgatagagtgtcaactgcggctcgggcgtgagtccccatgcctttggtcgaatgtttgtcggttcatactttttccgaatatataatcaaaaaaatggttacgacctactatcgccttactgtttatgcgtgaaaataaattcgctggtatactgagcattgtaattagaggtttaacgtttgaatgaaaaatactaaaaaatatgaaaaatcgctgctggcaattatgttgttcacggcagtgttatatcttttgatgcctcctgcgcttatcgcctattttttcggactctataatctgaatcctttttcaattggcaacctgccgcatttcaatccgtttaacaccgaacgtgggttgccgctgcaccaaatctactgttatctgctgctagcctggctgttgctgaatggtctgataattttggttatcaacttaattcatctggttttttttcgatctggtgatgatgaataaccactgcattagcatttatcagtattttattcggcaatacccggcgcttttctataaaggtgttacccttaatacgataattatcagcggtaatacggcactaactcgtagccacgcatctttataacattgtaaattatagggttgtgttaaaacgcggcgttcaaagccagcgtattgagggcagggctgccaatttcaattacagagactgttatgcatatcaccttgcgtcagcttgaagtatttactgaggtattgaaaagtggttctacgacccaggcttcggtggttttggcattgtcacaatctgctgttagcgctgcgttagctgatttagaaggtcaattaggcgtgcaattgttcgaccgggtggggaaacgcctggtgataaacgagcatgggcgcctgctctatcctaaggctgtagccttattagagcagaccagtgagatagaagaactcttccgacaggatgttgggtcactccgcatcgctgccagtagcaccattggcaattatatgctgcccgctatgttggcgcgctatcgtcatgattttcctgcaactccgttagaactgaatattggcaacagcctggatgtcattaccgccgtggctgatttccgtagcgatcttggactgatcgaagggccgtgccatatgcctgaattggtcacccaaacctggctcagtgacgagctggtggtgtttgcttctccagataatccattgtgccataagccgattacgttggatgaactggctgacgccgtatggattttgcgtgagcgaggttcgggaacgcgtgaggtgttggatcacttgctgctgacccatttgccacacttcactttactgatggaattgggcaattcggaagcgataaagcatgcggtgcgctatggcatgggcattagctgtctttcccgacgagtcatcgccgagcagctcgcgaacggcagtttggtggagatatcactgccgctaccgccgttggtgcggacgctatatctggttcatcatcggcaaaagcatctgtccaacgcgctgcaacgtttcctgagttactgtactgagacagagtaatcccgatttcgggttatggatattccagaggttcccccgtgattgtgttgatattttagacaaaaccgcctttttcattaggatttcactaataatctgatggcgatcatgaaggtatcttatatcagcgcattcagactacccacgctggcgggatttgttacaattccgcctcgtttttttcagggcagattaggtaagaatggctcagacagataataaaatccccgtgcagcatggcgcgcagagattacgccgcgagctgaaatcgcggcatttagccatgatcgctatcggtggctctattggtaccggcctgtttgtcgcctcgggcgctacggtttcgcaggcagggccaggcggagcattgctctcgtacgcactgatcggcttgatggtgtatttcctgatgaccagcctgggcgaattagctgcctttatgccggtttcaggctcattttccacctacggttccaaatatgtagaagaaggtttcggcttcgcgctgggctggaactattggtataactgggcggtcactatcgccgtggatctggttgcggcgcagttagtcatgaactattggttcccggaaactcccggatggatctggagcgcactgttcctggggctgatgttcctgctgaattacatttccgttaaaggttttggcgaagcggaatattggttctcactgattaaagtcactacggttatcgtgttcatcatcatcggcgtactgatgattgtgggcatcatgaaaggtggtgaaagtgcgggttggcacaactggacgattggcgatgcaccgtttgccggtggcttctctgcgatgattggcgtggcgatgattgtcggtttctctttccagggcaccgaattgatcggtattgctgccggtgaatcgaaagatccgggtaaaaatatcccgagagccattcgcaaagtgttctggcgtattctgctgttctatattctggcaattctgattatcagcctcattattccttataccgatccgaacctgttgcgcaacgatgtcaaagacatcagcgtcagtccgttcactctggtattccagaacgccggcctgctatccgctgcggcggtgatgaatgcggtcattctgacggcggtattgtctgcgggtaactcgggtatgtacgcttcgacccgtatgctgttcacgttggcctcggaaggtaaagcgccgcgtatcttcgccaaactgtccaaaggcggtgtgccgcgtaacgcgctgtatgccaccacggtggtcgctggtttgtgcttcctgagctcaatgttcggtaaccaaacggtttatctgtggttactgaatacttcaggtatgaccggctttatcgcttggttggggattgctatcagtcattaccgtttccgtcgcggttatatgaagcagggccgtgatcttaacgatttgccataccagtccgggtttttcccgctggggccaattttcgccttcgtgctgtgcctgattatcactctgggccagaactatcaggcgttcctgcaagatcgcatcgactggtacggcgtgaccgcaacctatatcggcattccactgttcctggttatctggtttggctacaagctgactcgtggaaccaaagtagtaaaatacgatgaaatggaattcccgaaatggaaagatgaacattaaggtttattgtttgcttcgctgaaagcgttcggcaatataaattaatgtgatagaagggcgattatttaatcgcccttttttaatgggaataattctcaccttattgtttttatgaaatcttgggcaaaaattttcgtgaagattggtcggatctgtttatttaagctgacggaaatgaaacgggtaggttaatttatttttataaaataggtatttacaaaagattacattcaataacctttagcaatcttattgataagtattatcgtttgttttattgttagcgccatcttataaagacgaccaaggatatctgcgtgaaatctgtatcacggaaaatggctaaaggtgtaagtatcagtcttttgatgggcagcacattaatggcgggttttagcgcctgggctgaaaatattactgatatggcagggcgttcggtagaaattccggccaaagtcgatcgcattttattaggtgaaggacgcttattctacgcagtctctctgctggaaggcaaaaagcccttcgaccgaattgtcggctggcagggtgacttccgtaaactggatacccaaacctacgccgtttataaagccaaattcccgcaggttgataatattccgttgataggcaataccactgccgacagtatcagcccggaaaaagtcctgacgctgaatcccgatatcgctatttttggtttatctggtcacggaccgggtaaaaacagcgaattggtcaaccagttagagaaagccggtgtgccggtggtgttcgttgatttccgcacttctccgctgaaaaataccctgccaagtatgcgtgtattggggaaagtgttgcaccgcgaacagcaagccaatgattacatcaaattctatgaagataatgtccgtaaagtgactgacattaccaacaccgttcccgccgagaaaaaaccaagcgtgttcatcgagctgcgtgctggcgcgatggaagagtgctgcggcactgccggtaaaggtaacatgggtgactttatcgatcaggccggcggtaataacatcgctaaaaacctgctgccgggagcactgggtacggtaaatctggagaaagtgctttcggctaatcctgatatctatattgctagtggtggtaaagcgccggacaataacgcaccgggcatatctttgggggcgcaagtaacccaagaacaggctcaggcaagtctgcaaaagattctggatcgtaaaggcatcaataccctaagtgcggtaaaagaggggcgaagctacggtatctggcacaatttctacaactctccttataacgttttagcgattcagagttttgctaaatggttctatccggaacaatttgccgacctcgatccaaataaaaccatggacagcctgtattctcagttcctggctattgagccaaccgggacatattgggttgattcaaagaaatagtctgtaacaggtaactgaaacaatgagtgtaactgcggaacccttaccaaaagtgaaaagtcagactgataccggcgtcatggggcgctatcaaaacatagtgcgccatcgattgttaattttggcggtattggctttggcaatcctcggctgcctgctgttggatttcaccatgggaccttccgggttatcactctcctccctgtggcagacgctggttgaccctgccagcgccgatgcgggcacccgagttatcgtgtgggatattcgtttgccttatgcattgatggcggtagtgatcgggctttccctcggtttggccggtgctgaaatgcaaaccatcctgaataacccgctggcgagtccctttactcttggggtttcctcagcggcggctttcggcgctgcgctggcgatagtctccggcattggcattccgggggttccggatcagtggtttatctcggttaacgcctttatctttgcgttgttcgcggcgttgatgctggacggcattacgcgttggacgcgggtggcgacctccggcgtggtgttatttggtatcgcgctggtattcacctttaacgcattggtttccatgatgcagttcatcgccagcgaagatacgctgcaagggctggtattctggaccatgggcagcctggcgcgagcctcttggaccaaactgggcattatgctcggcatttttgctctgatgttgcctctttccatgatgagttcatggaaactgaccgcgctgcgtttgggcgaagatcgcgccattagctttggtattgatgtgcgtcgcctgcgtttaggcactttgttgcgcatcagtatgttatcggctctggcggtggcattcgtcggcccgataggctttatcggtctggttgcaccgcacattgcccgtatgattttcggtgaagatcaccgcttttatctgccagccagcgccctgattggcgcattggtattgtctatggcttccgtcgcatcgaaaaacctgattccgggcgttattattcccgtcggcatcgttacatcgctggtgggcgtgccgttcttcctgagtattattttgcgccatcgggggaatgtatgaattcaggtttacgtattgagcattttaatgccggctatccaaaacgtccggttattcagaatctgagcgtacctttgctgccgcgtggcaagatcaccgtgttgctggggccaaacggcagcgggaagtccacgttattgcgttctttagccggtttgaaccgagcggaagggcagctatggctggatggtaaagatttgatgcaaatgccttttgcgcaacgagccgaacaagtggtgtatttgccgcagtcgttaccggccggcgtgcatttgcacgtattggaatcgattattgtcgcgcagcgggcgtccggtggccgtagtcatgccagcagcgaagcggaagtcatggcgttgctggagcaactgggtatttcccatctggctttaagttatctggatcaactttccggcggtcagaagcagttagtgggtttggctcagtcgttgatccgccagccatcgctgttattgctggatgaaccgctgagcgccttggatcttaactaccaattccacgttatggacctggtgcggcaggaaacccaaaagcgcaacattattaccgttgtggtggtgcacgatatcaatatcgctttgcgtcacggtgaccacgttttgatgttgcaaaacggtaatctgattgccgatggcgtaccggaagacgtgattactccagctagtctggcgaaggtgtatggcgttaaagggcgaattgaacgctgttcccaaggcacacctcaagtattaattgatggattagtcaccgaaccgacaatttaattatatattctcaccgccttattaaattatttcacataaataaggcggtgatattaagccgtgccccgaagttattataaaaataaaattcaagtggaaattccggaagcagtatttctgtttcaatgagcaatgactctaaatatataaaaataatatttatacatttcaatacctcatggagaatggtaatggcagtctttagcaaaacgaaaacagcggtattgattactgctgcgatattatctgcccaatcgcaggcagataataaaaataccgcatcgacagatactctggttgttaccgcaaccggtttccagcagcgtattcaggattcggccgcgtctatctctgtagtcacgcgtcaacagattgagaataaagcctatcgtgatgtgaccgatgcgttgaaagacgttcctggcgtagttgtcaccggcggcggcagtaaaactgatatcagcattcgtggtatggcggcgaaatatactctgattctggtgaacggtaaacgggtggatactcgcagtacgcgcccgaacagcgatggctccggtattgagcagggctggttaccaccgttatctgccattgagcgcattgaagtggtgcgcgggccgatgtcttccctgtatggctccgatgccatgggcggggttatcaacattattacccgtaaagttggcaaagagtggtccggttccctgcgtgcggatgccaccttgcaggaagattctaaatccggcgatatgttccagactaacgcctatgcctccggcccgttaatcgacggtttattaggattaaaagtcagcggtctgctttcacatcgcagcgaagataaaatcattgacggttataatgaacagagaatgcgtaatggtgctgcgacatttagtttaacaccggatgataaaaacgaatttgattttgaattgggtcattatgttcaagatagaaatgtgacgccgggttattctgtcaagaaaacagataaaaataacgacgttcagtatgaccgaaataactattctattacacataatggttattatgatttcggtaattcaaccagctatgttcaacgtgatgaaacgcgtaatccatcgcggaaaatgaaaagcgtcgataatgtctttaatacccaaacgtctttcctgctagataatcacacattaattctgggcggccaatatcgctttgaagaattgtatgatgacaataatcagctcagcacggctaaagatctcaagaaattaagccgctggagttgggcgctgtttgtcgaagacgaatggcaaatgaccaacgatttcgctctgaccggcggtattcgtatggatcaggatcagaactacgggactcactggacgccgcgcttgtatggtgtatggcatctggctgaggaatggacgctgaaaggcggcgtttctgctggttatcgctcacctgatttgcgtcaggcaacggataattggggacaattaacgggcggtggtaatggtgctccggcaataatcatggggaactccagcctaaaaccggaaaaaagcgtgagtgaagagattggcgtcctttgggataaccaggatgatctcaatgccggtattaccgtctttaatacccatttccgcgataaaataacggaaagtagacagtgtactgatgttgatgcaagtggcgaaccgagtggtgcggcttctggccagtgtagggtcaatggtgaaaacttccagtatatcaatgagcgtcttaacgttgatgaagcgaccatgcgcggcgttgaggcgacattcaattgggatatcagcaaggattggactttaggttctagctatacatttactcaatctaagcaaaaaagcggcaaattctctggtcaaccgttaaaccaaatgcctaaacatatggtaaacgctacgctggactggaaaacgagcgaagacctagcgacctggattcgggctaattaccgtagtaaaacctctgaatatctggatcgtaccaacctgaaaggccgcacgccgtcttatacctttgtagacctaggtgctaactataagctcactaaagaactccgtttaatgggcggtgtatacaacgtattggataagcgcgttgataccacggttagcgacaaagtgctggacggtcgtcgttatatggttggtgttaattacgatttctgattttttcttaattaaagcgattgatgaagccactgaaaagtggctttttttattcaatcttgtcgtgggggagcaggttgatgaatttctcgattttgcttccttcgtgctttttatggttttcaaaatatgaactttgaactttgaactttgaactttgaactttgaactttgaactttgaaatcggatcaggtttcagttgatatttgctttgtgaatatttcacttctacagcctcaaccaagtcaaagcgcgcaggcgcgagtcttaaccatccgcgcctccgcacaaagccgcttgctttacaggacacctcgttcatcacaccggctgacgggcgcctccctgctaatggcgtctcgctccgccgtccacggcgggttgccctatcctctgttcttcattcagcaggctgcgatgtgctcttatcttaaaggccgaattaaaaacacagaaaaccgaactataaagctttcaaaacatgatcctgcctgaattatcgaaaaccctcaccgcttttgtatatacgtcaacgccaacgctagcgccaaaaccaaccctttaataatatccattgcatagtaaggcactgaaagcatcaccaagccattttgcagcacgccgagaatcaccgcgccaatcagggtgccaaaggcgtttggtttgcctgagcctgccagtgaaaaaccgatataggccgcggccaccgcgtccatcaggtaaccgctaccggcgttaacctgtgaagaaccgatgcgggaagcgagcaaaatgccgcccaacgcagccagctgtgaggaaagcacataggccaaaacccgataacgaaccgtgcgaataccggacaaccgtgccgcttcaggattgccgccaatggcatacatacgacggccatgcttggttagcgatagataaagctgcaccactaatgtcacaatgagcataataatcacgatgacagggacttgccccaacgccgaaaacatctccggaatcagcccttcggccatatcgccactcggcaacagcatattctgggtgatagaaccgccgtagctgtaggtcatcgccacgccttgaatgacaaataagctggctagcgtcgccaacatatcggggatcttcagtaccacaatcaggaaagcgttaaacaacccgaccaaaccgcacaccagcaaagtcacaatgatagcgccggtggtaccgaagccgtaccagacaaacagcgacaccactactgcgttggccagtgaagcggtagagccaacggaaagatcgaaaccgccgatagatagtgatatcgatacgccgatggcgatcaccgtgacaatagcgatagatcgtaaaatattgatgatattgttcggatcaaggaagttatccgaagccagaccaaacagggcgatcaacgcaacaacggtaagtaacatcccccacttatacagaaaatcaaatagctgatgacgccagggctgcacattaggtaggggcgaatctttactcacgcgggtgttcctccggttgaaaatagtaatagcgtttcttcgttaatttctgcggcgttcagctcggccacgatgcgaccatcccacagcacgcaaattcggtcacataggcctaccagttcggagaattcacccgaggcatagataatgcctttgccctgacgcgccaaatcgtcgatcaggccgaatagttcctgtttggctttgatatcaacgcctttggtcggttcatcgaaaatcagtatctgtgcgtctccccgtagccatttaccgatagccactttttgttgattgcctccggagagtcgagccaatttctgctgcggcgcagaggtacgtatccctaagcgctgaatcagtgttttagcccagtttaattcctgtcggcggctgaaaatgctccagcgggagaaactgtcgtcggcgcatacactcagattcataggaatgctttcgtgaataaaaatgccttctttgcgccgttcttccggcaccagcgccaatccttgcgtcactgaacgatccggcgaatgcggttgccagcgctgaccacgtaattccgcctgtttcaccgtacagggcatcgcgccaaacagcgctttgcacaactcggtttttcctgcgcctgccaaaccggcaatgcctaaaatttccccttgatttagctggaggctgatatcgcgcagtttatgtggatcacgcaatccactgacgctcaaaagggttttatcgctgcagggcgggcggcggggagggaatatatcgtctagctgatgacccagcattttctcgacgatttgctcactgctcagcccggccatagcgccgtggctgataaatcgcccgtctcgcaacacggtaatctgatcgcaaatctcgcgtaattcatggatgcggtgagaaataaatacgatagcaataccttccgatttcaggcggcgtaccaccgtaaacagacgggcgctttcttcctgatccagcggagccgttggctcatccagaatcaaaaaacgacagtggtgggaaagggcgcgcgctagcagcacctgctgtttttctgccagggtgcaggattccaagcgctggcgaacgttcagcggtaaacccaattgttggagcaactgctcagcctgacgataaagccgcggccagttgaacaggtggcccgattctgccagcgttgccagcataatattttctgctaccgacaagcttggcaccaaagcaacatctacctcttgctgcaccacgtgaattccgagctgtttagcctgaagcggcgaatgaatatctacccgctgtccgtctatgaaaatttcaccactgtagtgaccgtgcgcaccggaaaggatcgccattagcgttgattttcccgctccgttggctcctaccagtgcatgggttgatccgccttccagcgagaaatcgacctgctgtaaggcatgaaaaccggaaaacgagagtgaaatattgcgcatttccaggcgagaaggggtgagggtaggcataagtttctgtaacggccccgctaaataggtgaataccgcccaatagttagctttatcggtggggtaataaaaacgtttcgtcaggcgaaaatcgtaaaaaaaacgtcaaaaaatgcgcttgttctcggtgttttttaacatgttttaaatcattagtaatgaactaatagggttaagctatagcaaataattattaaacatctttggcttagccattaagatgaatcagaccggacaggattaagacaggttagaaagtaataataatcgccgttgataacaactgaaaaaaaattcataacatcagcaaggaaatggcatgagtgcgaacacaatccgcgtgcaggtagggcctgccaactattattcttttaccggtgctatcgataagctgagtgaattctatccacagcccgtattggaaaaagcgctgtggatttatggtgaacgagcattaaacgccgcgcaggattatctgccagcggaatttcattccgccaatgctattaaggcgcgctttaacagccattgcagtgaatccaccgtggcagaactggtcagtgtggccggttccgagcgccaggtggtgatcggcgttggcggtggtggcgtcctggataccgctaaagtggtagcacgacgcttaggcctaccgctggtggtcattcctaccattgccgcgacctgcgccgcctggacgcctctatccgtgtggtataccgagcaggggcaggcgctgaattatgaaattttcaatgatgctaaccatttggttttggttgaaccgcgtattattttgcaggctcctgtggcctatctgctggccggtatcggcgataccttggctaaatggtatgaagccgttgtattaagcagcgatcctaaatccttaccgttgacggtgcgtctgggtctacaggcggcgctggatgtgcgtaatgttctattggaacagagcgaggcggcattgcaggcagtcgcgcggcgcgaattaacgcaggatttcctcgatgtagttgacgcaattattgccggtggcggcatggtggggggattaggcgagcgtttcacccgcgtggcggcggcgcatgcggtacacaacggattgacggtattgccgcaaaccgcacgtttcctgcatggaacaaaagtggcctacggaattctggtacaaaccgctttgctggggcaggaacaggcgttgaaagacctgattgctgcctttaaagtctggggcttaccaacccatctggccgcgctagacgtcaatattcgcgaccgtgatgccattgaacaagtgattacccgaattcttaagccgggagagtccatccacgcactgccaattagcctgaataaacagaaaatacgggcggcaattgagcaggtagacatcgctgcgcaggccttataaggcgtggtaagggctttttttcttcgcagagcgaaataaactggtttgggatggttttaacgtcttgtcttttcatctcggattagggcagaatacgcgccaagaaatagccgacgttttaaataactcgtcggttatttttttgcattcgtgttttcacaaatcaagaggccgggcatcgatccggatagataaataggtccgcgtgcgattattcacaccatgaaatcgccgttatgaggaaagaaagatggggcaattgttcactttagcgtcggtgcctaccggcatgcgctgcacacgcagcgattatggggcagcaggcattttttcaacccgctattccgctttcattaccccacttgcgtatcccaggcagatacgaagtttccccgtcacctctcgactttgtggtacaaacacaaatctggtcgaaggtatggggaggctgaatcatgtcgcttaatacagctgttcaggtcggcaccaatcagacaggcaccaacaatcgcgtccaactcagaaaaactctgacgttggttcaagtggttatgatggggcttgcttatctgcagccgatgaccatttttgatacttttggtattgtttcaggcttgaccgatggtcacgtcgcgacttcttacgccatcgctttgatcgcggttctctttaccgccgttagctatggcaaattggtgaaacgcttcccgtccgcgggctcggcctacacctacgcgcagaaatccattagcccacacgttggctttatggtgggttggtcgtcattgctggactatctgttcatgccaatgatcaacattctgctggcaaaaatttatctggaagccatcttccccggcgtgccttcgtggatcttcgttggggcgttggtcagcctgatgaccttgttcaacctgcgcggcatcaacgtggttgctaacctgaactccatcattgtggtggtacaggtagcgattatggtggtattcgtcgggctattgattcatggcgtttatcagggtgaaggtgcgggtacattagttagcaccaagccgttctattcagagaacgcccatttggtgccgatgataaccggtgcgacgatactctgtttctcattccttgggtttgacggtatcagctcattgtctgaagaaacgccaaatgccggcaaagtgattccgaaagccattttcctgacggcgttaatcggcggcattatctttatcgcggtatcttatttcttgcagttatatttcccggacatctcgcgcttcagcgatcctgatgcgtcacagccggaaatcatgctgttcgtggccggtaagttcttccagtctgtgattctgtgcttctcttgcgtcacggtactggcttcaggcatggcggcgcacgccggggtttcccgactgctgtacgtcatgggccgcgatggtgtattcccagagaaagtgttcggttacgtgcatccgaaatggcgtactccggccatcaatgtgctgttggtcggtggcgtagcgttgtctgcggtgtctttcgacctggttaccgcaacggcgttgattaactttggtgcgctggtggcgtttacctttgttaacctgtcggttatctcccagttctatatccgggagcgcctgaaccgtacccttaaggatcacatcaactacctgattctgccggtaattggtgcaggtaccgtcggcgtgctgtggatgaacctggaaagcagctcaatgaccttaggtctggtttggggggcgattggtctggcgtatatgctgtggaaaacccgtgttttccgtcaggcattaccgcagttcaatgaagaacttgcacgataataaaacttgattgatttgtgatgaaaagcggagccgattggctccgtttttttgtccgcaatctgcgggtaaaaagaattggccgttggaatagggcgaaatacgctgttttattatcagtgctgatctgcacgactcggcaacctgatgttcaatattggtgttatcggcggactgaatagcaccgccgggtaatcattttggcgagaagttaactcactaattcgcgagcataatcgtacaatgattttaatagctccaatttatctttatcactttcatacagattgtagaattgctccaattgctgcacatactcctgtacccgctcagggcttagcacttcgcggcgatggttaagccagcgctgctgctcgctgtcatccagagtattggggtagtttctggcgcgaaaacggaacagcaactcatccaaacgtcgatcctgaaaactcagatccagcgcaggcagattttgcggcgcagtttgctgaataatcttcattgccgctcgatcggcgtcactaaagaagccgtcataaagctgggcatccacatcgttggatgcagcaaaaggcggggcttcagcaaacagggcaactactttttcgcgtatctgcgggttttgtcgcaataattgcaaattttgcaggcaacgttggcgatcgatacctaaacgttcggcattctctgccagcagagttttcgctggagccagcactggacacttattgatatgcaccagtttgattggcacagacgattgattggcagaaagctggtctcgacgagtatataagcgttcacgcaaggcgtcggtatccagttccagcagcggcgacatatctccggccagatcgcacatgatgacggcgtttttgttatccgggtgccaggccagaggtgcaacccagctggtgttacctcgcgcagcaccaaacatgccggaaacgtgcaccagcggagtcatctcggcaatgtcgattaacgaattgattttatgcttattacgatgctgatagagataatcaaacaaccgaggttgcgcctgcttaaccagttttgccatcgcaatggtggcatgtacgtcagacatcgcgtcatgagcctgtaaatgttctacgccattggctttggtcagatgttccagtttaaagctcggcaggccgtcgtcattttccggccagataatgccttccggacgcaaggcataacatgcgcgcataacatccagtaaatcccaacgagaattaccattttgccagctgtaggcgtaaggatcgtagaagttgcgataaaagatattacggctgacttcatcatcaaatcgaatattgttgtaacccaaaatacaggttccgggcacgctaaaagcctgatgaatccgttgggaaaactcagcctcgttgacgcctttggccagcgcggtttgcggcgtaatgccggtaatcatcaccgcctcgggctgtggcagataatcgtccgccggagtgcaatacaccaccaatggctcttcgatgatattgaaatccagatcggttcgcacaccagcaaactgcgccggacgatccagcgctggatgttgaccaaaagtctcgtaatcatggacgtaaaacgtcggtgatgaggttggttttgccattcttttgtattgacctttattgactctggcttaggggctgagatttacccacggcagccactcactttgtaacaagaatatcatctcagcatagttttcacgtcagttttatcatcactaaaaccgaggggatctcgggttaccctagttagataagatgagaacgaccccgcatgtgaatcggaacataatgatatttatacttaaaaaaatattgaatcatttataaattaaataactttgactttaatgattcattaaacgagttatttaacttccgtttactcagccctttatacaatgctcgacataaaatacttaatagggtttgaaacggtgaaaacacttttattgaccggggcaacgggctttctgggcggggcagtgctggaaaagcttctgatagaaaattcggattttaattatttattattggttcgggctaatacaccagagcaaggcttagcccgtatcaaacataatttagaaaaattttatctttcgccccaaaatctgaataaagttacagaacgacatatattattaggtgatttggctgagccagaaagttttatttccgatcctcggttggatgaggttactcatgttatcaactgtgcggcggtagcctcttttggcaataatccgttaatctggaaggttaacgttgaaggcacactggcctttgccaaacgtatggctcaggtgacaggtttaaaacgctttgtacacgttggtacggcgatgtcttgtacgccggatgcaggaagtctggttgatgagcaggtattatctccggccagtgaggcgcatttagtcgaatacaccaaatccaaatcaaccattgaaaatctgctttcagaacaatgtcctgatttaccgctggtgttcgcccgaccgtctattgttgttggccatacccgcttaggctgccagccttccagcagtatattctgggtcttccgtatggcattaatgatgcggaagtttatgtgttctctggacgatcatattgacgttattcctgtcgattactgcgcagatgcattggtctgcttattattacatccagaattacctgactatatttatcatatctctgccggtgaagagaatagcgttagttttgccgaaatagataatgcgatgtctctggccgcgaaacaaaaaccagtgggaataaattatatgcaggttgattacggtgccttggtacaaatgcgtaatcagctgaaaaatatatttgggccttgtaatgaacgcttaatgctaaaagctatgcggttatatggctcattcgccatgctaaatgtgcgctttaataatcagcgattattgagtttgggaatggcaaagccgccgcgctttacggattatgtcgcctgttgcgtagagtccagccgcggtttaaccattcaggaacaaatggccatcgattttaaataaaattagtacaccttcttacccggcaacaacaattgccaagattgtcatattttatcatgtttggcggagtgccagatgttggttactccgctagaattagccctttcctgacgaatagggtgagtgtgctgtgcgccttgataaagcaattacgccactggataatttgatttatagcaattaccgtattgcccacgctttacgaattagcgtggcctttgtcctaacctttcttatcctgcgtttacttgccttcccggatgccacttgggcgctaattactttggtcgtggtgatggggccgctttcctattggggaaacgtcttttctcgcgctattcaacgtattggcggaactctctgcggggcagcttcgggtctggtcgcgctgtatcttcaacaatattctctaaccgctatgctcgcttggtgctttgtagtgatgtttgtctgcggttatttaaccttgggcaatcggccttatatggctttattgatcggtgtaaccttggcattagtttgcggttccggctcggtcgatatgagtaccgctctgtggcgcagcgccgatgttattttgggttctttactcgcgttgttatttactagcatttatccgcagcgggcttttacccattggcgtatgcaattaagcaccagcctccacgccatcggcactatctatgctgcttatttatcacctaatgtggtcgatcgtcctcgtttagaggacaaaatgaaaagcgagttagcgcgattggtcaaaatgcgcggttatatcgcttcggcgaccaaagaatcgggtattgataaagaggtatttaatgcgattcaaactctgtatcgcaatgtggtttctacgctggaactgttggccgatgcctattggtcgtctcgcgaaagccattttttactgctgaatgtccaaactctgcgccatactcagttgctaactattcgtactctggataatttaagtcagtgcctgctcagcggccagccggagtatgaggaggtcgccgccagcgaattgagtgagatcagcgtagaattggaaaaactgcttgaagttgctaccaaaaatcagcaaatcgaggcgcctatttatggctatgtgtggttgagcatagaaattacccgccaattgaaagaactgggcgatttgattgagatgaccatgcgacgctagccgattatttggacgcgaaaggcgatgaaatttctgtctgacgggtaaaaaaggtaagataagtcaatgaatcttgtctctgatggctgctaacctgtattgttaagatcgcgtgttgtcgcgacgtgatggtgaacagacaaccggccgtcagcaattgaatttgtgtaaaacttagctaaggtgtgaaaatggaaaatgtaagcaagccaactttccaggacgttttggagttcgtgcgtatgtttcgtcgcaaaaataaattgcagcgtgaaattgtcgataacgaaaagaaaattcgtgataaccaaaaacgcgttctgttgctcgataacttgggcgaatacatcaaacctggcatgagtattgaagacgtgcagggcattatcgctaacatgcgcagcgactatgaagatcgtgttgatgattacatcatcaaaaatgccgatctgtcgaaagaacgtcgtgaactgtcgaaaaaactgaaagcaatgggcgaagttaagtaacctgagcgatttagtttaaagattggagagccagattgatgtctggctctttttttatctattgaaagtgaatatccaaacccgcgagttaggaaaacctttgatttagcgtaatcatgggcataaataatcgccatttagcacatttgagcgatggcgttgttgggaatgcctggcaatgttatttgccggataattacattatttgcaatagcaaaaagcccgactaagtttccttaatcaggcttctttaatatggctcctctgactggactcgaaccagtgacatacggattaacagtccgccgttctaccgactgaactacagaggaatcgtgtgaacgaggcgaataatagcgagggcggacgggtttgtcaaagtagaaaaccattaaaaacgtgcgtttgctgagagaatgagcttattgtcttgtttttcagcaaaatcagctcgttatggtgcaagattatgctgttttatttcttttcccctttgcctgtaacaaaggggaatgaggttgataaggagaaataagaaagaacaacgcttaggctttacttctgcgcagtaatattcgtgggaaaagattatctaaaacccctttgccactgagagtgaaggccgaaagcagggtaaaactcagagcaatcgagccaagaatgaaataggtatggctgaaaccgatctggtcatacattttgcctgcaaaggccgagagaaatatcgccgctacctgtttggagaagcaaaaaccaattaaatagatggtggcggaaaatcgcacgtcaaatactgaggtaatgtatttgaaggaaccaatgagcaggaagggaacctcaaaagcgtgcagcatcttcaggcaaatcacttccagcggcgttgtggcgaaagccgagccaaaaatacggatcgacataaacatcccagccatcagtagcgcatttttgctaccaatgcggttaataatccagggtgcgcagaacatcagcagggcgttggccaattctccaagcgtggtgacatagccaaatatttcggtgccacgttgtttcgactcaaagaaggacttaaagaaattggcaaactgttgatcgaaaacgtcatagacgcaggcaacgccgatgatatacagaataaatagccacagcttgggcattttaaacagttcgccgaccattttcaggttaaatagcgattcgttggcgcctaattgattcattacttcggcggagcggtttttatgaggtttggctattaacagtaatgtggccaatatcagagcgctgcctgatcccatccaaaacaccaggtccggattgacgttaaacagtattccggcggtagaggcgcagattccccagccaaaacagccaaacatccgcgcttgtccgtattcaaatccgctggtacggctaactcgctcgacataagcttcgatagcgccggagccgccggagaaaacaaaacccagataggctccgccaaccaaggatccgagcagcgtgttgtatttcagcagcggcgcgaagatatacaggaagaaaggagcaaagaagattagcagtagggtaatcgtccagagtagatgctttttcagccccagtttatctgaaagcacgccgaataccggttgaaagcaaatggcgaataacgatagagaggaaaagacgattccggtatcggttttgctcaggccaatcacgtcggctaaccaaatcggcaggaaagggaaacaggctgccataataaaaaaatagaaaaagacaaaccaaccaaaaatccaaaagttagagttattcttattaaagaatgggctactttgcatacaacccccgtaaggtactcaatatgttctgcacaggttcgctggttatcgttctcggccaggtgcctgccagggttattcatcagggaaagcgcgacgaacctcgccgcgcattaccaacgggaattacaattgttcgaacttgatcaaaatggcactttcaggatccagcaccggtaaagctaaaccaacctgtgccagccattctccattggcttcgatcggctgaatcatccatgggggtaatactttcatggtatgcccgccttgctcgacgctaatcagttccggtacgtccagcaggctaacgcggtaacgagcctctggacgtagataaggcatacgtaactgaccaggcagagaccaggttggcatcgccagttggctgacaatcagtagcgcctgatcctgcgattcgctgactacgccgtgcagcagggtcgtgggatcgtggctatccagccgcactacgttgccactgtgtaataaaggtcgcaaagatttgtgcagggcgatatagcgggcaaaaccgcgctgttcttcgctgctttctttcaccggatccaattccacgcccatatggccaaatagcgcagtcagtccacgaaaagcgatattgtgctgccgataagtggtgtggcagagtttgccaccaatatggcttcccatgacttccggcgggaagaaataactcataccgcgttgaattttctggcgttccaatgcgtcattgttatctgaaggccagaagcgatgggtgcgtttgagaatttcatagtcaatacgaccgccgccggaggcgcaggattcaaattcgacgtgaggatgatgcaattgcaaagtatcaagtagacgatacagcgcttcggcttgcccggttgaccccgcgcgcccctgatgaccgggctgaacgatttcccgattcatatcccattttacataatcgatgtcatgctcacccagcagccagtccattcgcgctagcagataatcgaagaccgccggattttgtaaatccaacacgtattgccagcgtccggtcggctgttgatagccgggaagcgccaatagccagtccgggtgtgcacgatataaatcagagttcggattaaccatttcgggttcgacccagataccgaactccatgcccagatctttcacctgctggataacaggttgcaagccgttggggtatttcttttcatccagataccagtctcccaacgccgctctatcgtgatttcttccttggaaccagccatcgtcgataataaagcgctcgacgcctaggtcggccgcctgccgagccatcgacataatgtactgcgggttgtgatcgaaatagatgccttcccaggtatttagatgcaccggccgggctttgggctgcgggaagtggacaatgtgttgacgcacgaagcggtgtaactgttggctcatgccattcagcccgtgattagaatggctggcatacagccaaggcgtggactggctttctccttccgccaaactgacttcacccggtaaatatagcgcttcggcctgaagcaggcgacgtccatcggttttcacatcggcgcgcagacgatggttgccgctccagcccaaatgaataccccaaactttaccttgttgttcactataaccgtggcagccgagcaccatgccggggaaatactcgtgggagctacgaccccggcggttttcctgctgatagctaccgtgctgcaaggtcacgcggtggggctggaactcttttacccagcgaccatggaaagccatcacttcatcggccgtttcattgactggcagcgtcagtgccagacgatccagccagtaattttcgcagcccaaattggttaagctgttacgcaggctaagaacgccactggcgctatccagattcagctctgaggtcaggcgcagtcccgcgatatcatcttcgccaataatcgttagctgattatttttatgctcgatttgggtggtaacaaacaccggcgaccagtcctttccgtctcgatgtccttccacgctggggcttccgaacaggccatgccccagttctgccgccagcgttagcggtacgtcaacgtctaaacgtccgtgtggcactgcccgattcagggtttgaatatcttcggcattgaaactgtgcaggtgcggtccccaataaagaatttctgcatatggctggcaacgaatgatgacgtcagtggctgggctttccagtcgcaggatgcttggttccatataatcctctcggtaagctaggaatgaatcagtgaggattagcattgatccgaaacgtttcggcttaaaccgaaacgtttcggatctgtgatgaagttagaataatatcgagtcaacaaacatcggatacattaaatttagcgatggagttaagtgaaaagaatggtttttttctttttaaatcagagtattaatttgctttgtgcagtgtgtccccaacgcctaactttggttgccacaaaacctgtagctgttctactggcgcaccttcaattaaggccaacgtcatatcggcgattttttctccaaccgcagcacgagtctcttgaacaatcggcgtgacggtggtttcaaccaaagaatcagccggtaatccatcaaatacaatcaatgaaatcccttgagaacccagcaggttatgttgctgtaacgccattgctgcgccgtctcccagcatattactgtcggttactatggcggtagggggctgcggcaacgccagcaagtgcagagtggccagatagccggcgcggcggttgctatcaattggctgctggtaaccctcgtccagcggaatctggtggttagccaatccatctagataaccttgtaagcgttgattaacataggtttgctggctatttccccccagataggcaatacgtcgatggccaagttccaccagcttttctactgccagtagcgttccggcgcgattatcaaaatcgaaccaggcataagggctatccagtgagctgcggcccatcgctaaaaagggtaaatgatgctgagccagatagcgtaaacgacggtcattctgctgcgtgtgtgccacgatcaacgcgtcaacccgctggctttctatcaggcggataaacgacggatgttggtcatgagatacatctgaaaccagcaataaatcaatattatgcagtgccagcgcggcgctgatggtactgatggtttccagaaaggaggcgtcgttaagcacgttaggttgaaacggataaactagcccaatcgcatcggttttacccattttcaagcgccttgccaaagcattaggacgatagcccaaacgttcggctacggcttccacccgctggcgagtaatggcggatacatcgctgtagccgttcagcgcccgactcaccgtcgtggtggacagctttaattctttggcaatcatttttaacgacatagggatctcggcaggaagaagaaaggaattatcccattgattcaatatggtaataatttagggcgttgggcagtgaaataccagaggaaatgcccttatttgcgtgccagaccgcagggaaataagcggtaatcgctgtgtattaccgcttcaggagatgaacgaaagcctgcaggacgcagattaaagcgattgagtctggctaatttgagccccgctatcgtcaaaataactgtatgtcagcgtggctccgtgagcgttggcgggcagggggttttcggtgctgtactcacgttcgctgaatggtggggtcatcatatccatttcctgcaggatattaatctttttccctttgagactcagcgtcatttgcccgaaagagacgtgatacggcgtgggattgtggctccgcagccgtgtttcacccgcgttctgtatcagcgtgaaattcactttcttcatcgcagcttcgggggagtgagtcagtccttttgggcgataaaacactttcatttgggtgttcatcgccatggcgacctgcggattatcttcattattggaacgctctttcggcgggatctcgtacaaattcagccaataaacggattctcgatcgctggcgggttgattacctttgctaatgatacgcaggctttgcattgatcccggctgcattttaaaaaccgcaggcagcggcaggaaaggggctttggcctgatccggcgtgttgtctacgtcaccatcatcaatccagctttgtaccactacgggatatttattggtattagccagcattagggtattttctctttctccctggagaaagattattctggtggcggaggccacaataccggcatccgcattgagactgatgataaatagcagcaacatggttagtgcggataacaggtttttccgcgtgcagagcgtatgaaatcggatcattgtactttcaccaaaacgtatgcggtggcatcgattttaccggcggttggtgcgctccccggcagttttttcagcgtagcggtaaattgggtggtgtaattgttataaccggcggcgctgctgccgttggcattggcgcccgcgagaatgggataccacccagcattagcagtggaggtacagttaccgctgcatcctccccagccgacaaaattcatcggcgcaccgctactgtcttccagcgtgataccgacaccggtggcgatgcggctgtcggtgccgtacagatcggaaagcaaatagctcacgccgcccgccgtattcaccaaacctaatccctgcgctttcaaataccccggtaaagaggtttggataccgattgaggtttggccgctattgataccggaaatggttcccgtctggcattccacatcgacattgatgctggcactgcgggtttggtcttgcgccagttcgctaacggtaatcgtgggaaaaaccacataaggggtgacattgcgcaccacgcaggtgtttttacggctcagggatgagaccggcgcggtattcatgccaaaagccatatagcgaccggaaccccaggtatcgaagcgggtggaggagtcatagcccgtttccggcacatcggctcccggccctttgaacaccacatagccatttggctgattacaggtgtaattaccggaatatgtgtctgccgccgggccgggacagccccaggttgaggggccgggagtgcgatccaccgcggcgactttttttagctctgcgcgtatctggctgaaatgtttgcctttgatttgaattttattaccgagtatgtcgtatttagtcagacgaacctgctgccagattcgggtgaattccatgccggaatccacgtgaatcagtttcagcgcggtgtaagggaaaaaggtttggaaatagttatcccccatattggtatagccgccgacgttactgtcgccattggttgcaaaaacctcgtacagactgtctttatccgccagatcgcactcgtagagcaccgtttccggattggctaacgctcgcgccggaaccagactgataatgctagaagccagaatagaatctactggctgaatataattactggtcatattgatattgccaaagcgtaggggcgcgccgttgctgtcgccgcccaggttgtatcctttccagacgcatttggcatagccgggcaggctcagtgtgagcgagacggaaaatagcgccagcgggagaaaatagcgtttaagcgtaattttttggcaatacgaggttgatgacatcatataacttcctgaattagtgcatatcattggcacaaagtgcgtcaaaagcgatcagcggctgtttatcatcaacgccgtccaaatcgtaaggcagaatgcagcgctggtggtcgccatcgccccatttaatcgtgagttttccctgtcgttcatcggcacgcagataagcctgaccggcctgtccaaccatgcccaccacgatattttctcggttatacacgttggctcccatcggaacgatgctggtatccggacgcttgatggtaatgagcaacggatagccgtttagggtacggaaagtgactttcaccgcggaaccggcataaggcgcgatgcggcgttcgccgtcctgtaattcggttttgaaatccattccctgcggatccagggaaatagtgttgtagcgataaggggttaaagtcggcaccaatgcatagccgaagcgatcgatactggcaccttgcccgtacatcactttggctccttcggcacctttggcttccactaacgcaaaggtttcactgagataggggcctagggtgacgccaccgccgtgcacggcgacagcaccgcgcgcgctgccagaggcctgccagtaaccggtactgagtgaggcgctgccgctcaggctggtgaccggcaaccgttgttgcagactgccgctccaggtgttttctttattgcgttggctgcgcgagaaatccaggctgtagctggcagactgatcttcaccggtgacgcctgaaagagaggtttgataattggtaccgctactattgctgtgaattgcgccgatggaaacataaggtgcactcgggctgcttcccagagggaatgacagagacagctgtgccagcgtttcttttccggcgggcgtttgtaagccgctttcgatcggcatacctgttatcggatcttcaaaattgccgctgccggtcgagccgccggtcgtctggcgtgaaacggagagattcacattgacctgattccagagcagcgtggcgtaacctagctgcaattggttatcccgactgcggccatcgcggtaatcctgcgacgaggcggtgaaatacagcgagccatagtcctgcaaactctgattcatcgacatttcaacccgcgagcgctgctggtagctaccggactgccaggtttcaccgcgactggttgctcgaacgccaatgacatcgcctaaatcacgatagccttcggtggaataacgatagcctgccagagataacgtggtgcccgtcggctgaaaggtgcggctaaaggaggcgcgcaccatccagccgtcttgatgttcatcattaggcagttgcgcgctggagtaagtggtgtcgaagcccagagcgccaatatagtgagcgaacacgccgccgagcataacgccttgataacctgaggctaaacgcaggcctccgttagcggtcagggcgttactgataccgtactgataggttagctcgctaaatgtttcgccattccccacatcgcgtatctggccgctggaaaaactgtagcgtgaaaaaccggggcgcagtgattctggcaccgaagaaaaaggtacgcgaaagctgctggtggaaccgtcggcttcggcgatgatgatcgttaaatcgccaccaaagttggtggctgaaagatcggttatttcgaattgccccgcagacacggcagtttgataaataggacgatcattctgataaaccgttacgttggcattggttttagcgatgcctcgcaccaccggcgcatagccgcgaagggaatcgggcagcattcggtcgtcggttgccatggtcacgcctctaaaacccagactggaaaaaaactggccggatgaaaacccctcgcccagcgtgatttcgctgcgcaggcttggcaatgcgcgttgagcgtaaacccgcgtggtcgtccagtttccgccgcgattattgtcatagcgaaaggagccctgttggcgtaaacgccacatgccggcgtttacgccgttggttagcccaagataagtggaatcggtattctgcgtgacgccgttgcggttataagctacgtgatattggttcagattataattactgaagcctatgctatcgccgacgttgaggtttttcggatcgacataaccccgaggcacctgcttcacaaaactttggggtacgcccagatcgaagcgtaataaagaataatcaaagtgctgagtgttgcccggtaataaaatttccagaggctgacaatctgtttgtttcttggcctctgccagtgctttatcggcaatgcccgcctgagccaattgttcgagagaaaaacaggcctgaaccccagcggtttgctgcgtgaatttcagatctattctgtcgataaaatgattattcatatagagatcgacctgatagatgccgatctccagattattcgctttattaaatctggcgagtgatccttcgcctagtggggagccacgtaataaggcttcttcaaaaacgtattcatctctattgccatcattaggcactgaggcaaaggcggagtgcgttatcagcaaacccggccccagcgtataagacaaccaagagattaatttcactttctatacccactgatttcttgattaaacataaaccagttataagctataaatggttgagatattcgctccgtagtcgttcactaacgtaagggtaagttgctgacctttaatcgcttttattccttctggaatcgtcagaatcgacgaagattttggggataccatctcactgctggcgaaagaaatgattttattattcaccgtcatctgcgcgtctcgtaagctaatgaaatatccggttgggttatttatgattattttctgtccggtattatcactgaggctaacttgtattttttcatgcaggttatcggtgttttcattaagcgcggttggtcgataaaataccttcaggcgattttttacaatcagcactaatttattattggcctgtttatccgctttcatggcgggaatctgtagaaagttaagatagaaaacggattcgcgatctttggggagattacgttcgatataggccagacgaactacctgaccgctttgtggctccatacgaaatatttgcggagtcagtaaaaaaggcacgtcgtctttggttggtgatgactggttattaccatcatccatccagatttgcaccaaattcggattatcgtctttgttgctgagctgtaatattttttcccgcgtgccttccggataaaccacccgcgtgcctgtcattacaacgcttgcctgcgctgcaaaagaaacaatgctggccaaggccagcaagatgcaggcaatgatgtttttagcgtatatcgtcattggtatctcatattcttggcgtgttgaattaattagcctgaacgggtaggccagcatcactggaattatcaggggtaagtaatggcgtattgtgccgaagccatcacgctaccggcgaccgcatttccgctttccgaaatatattgcacggagagatcctgagaggccgaagttgcgcctgttgctagcgtaattcccggaacctcaacggggccggaagttaaaatgaccgggcgatcggttgagtctaatagttggattgccacaaactgagcggtaccggtgttacccaaatttccggctggggtgacgttcattccctggaataccgaactgattttggtttctttgctggcgacattacagccggtcaggttgatggtgaaattggttttaccagcgacgctattggggccggacagactggcggaagcgacggtgggcagtaatacaatcggcgtatttgccgagccatttatatcgacctgacaggtttgttcagctacctcaccctgaaacttaatggtgttattagacgtggcagccaatgcaacaccgggcaaggtgaatagcagggccatcagtagcgttttattcattctgatctcacttactttatatgatttaaggacacagacttgttcgggggggagggcaagatctgcgaggcacggacgatggcgatatcaacgaccgtggttaatcagcgcgtagtgtaggtgggatgacctgcaagcagaatgagaggcgtctttgatttctataggaaacgtcctacaagctttgtaggataaaggctactagagctaaataggctattttttaggaggttgggtattaataaaacggcgattggcgctgagctttgttttgttatagagaagcgtcatagagagtaggcagaattaaacgggtaaaacgccctctttcggtgatggcgttattatcaggcgcgggtacaggccgtttgcccgaattaccgggcagcggctttggcaatttgctcattggtttgtatcaataacgcctgccatattggccagtgttcggttattgcatgatgattccgactggataacaaatcctcaaacagaatacagcttgcgactaaatcctccgcggcgacaaattgaacgccgccttttatgcgatgtatcagattggcaatttccttgtaatctgtttcccgttcgaggggattgtcacttagctgagtcataatttgctgtaggcgcgccaaatccaactgattactgctcaacaacgaggccaatagctctttttccacaccagcgttgccaccggaaagctggcggagtttactgtgcattgcgcgcgtatcttcagccgcctgcatcaactcagtcgggacttgggcggtgataaaaccttgctgtgccagaatcatacgtagggaatccagcgtgacgggtttaatgaggcaggtatccattccggctttttgacactgcaacacgctttcttcacgagcatcggcggtacagccaatcacaataatatgacttagccgctcatcgttacgaatgcgataagtcagctcaaaaccattcattaccggcatattgtaatcggtaatgaccagatcgaacgtttgttcttgcagcagcgcccatgcttgcgcaccatcattggcggcgactacctgcttcaggccgatgaacgccagttgctggcgtaatactttacgattcacctccatgtcgtccaccaccaaaatattcagatggctgacttgttgcggcatcgcggaaagtctcggtggattatcggttgccaccggtgtcagttccgccagcgtcagaggcagcgtgataaacaggctggttcctttgcccagttcactttccatagaaatatcgccgcccatcttcatcaccagttggcgacaaatccacaggcctaaaccggagccgccaaaacgcggcgatccaccctcattggcctgactgaatggctggaacagtgaagcctgcgccgtatcggaaataccgattccagtatcggtaatatctatgcttattattccctgctgaggggcggtggtttcccaggtcacatcaatggaaacgccgccttgctcggtaaatttcagagcgttgcccaacagattgccaacaacctgtttcacccgcagcatatctaccaacaataatggcggtatttgatcgtcaatccagctggaaaagcgcaattgacgctcactggcgataggctgataaatttgcaacaaccgctcgaattcagcgcgaaaatcggtcgcaaccggatgtacgctaagttggccagcttcaatttttgccgagtcgataatgtcatccagcaggcgaagcagcgattgagcagaattagacacggtttttaacgtttctttttgtactggctgttggccacgaatttccagttccagtagccctaaaatggcgtacatcggcgtgcgtagctcatggctaatggttgccaggaaggtacttttggctcggttggcgctttcagcctctaatctggcggcttccaactggcgctcgatgtttttacgctggctaatatccagccagccgcctaatagccctttttcagcgctatttaatgggataatccacaggaagatatcccgcagctcgccgccaatttcgattgaaatatccagcatttgcggctgcatatcctgtaatacctgttggcataaatcatcaatttgtctatccagcggagtaatgagcggccagtcggcattgtcgccattttgattaagcagatcttttagctcatcttcacgatcggcggcaaagtaacggttgtaggtcgctaactgcccgtcggcggtgcggataaacacagcgaacggcagggcattaatgatcgattcctgctgtaataatcgggtatgtaattggctggcttgacgccgtttattaaataccaggtacccaaggtataaaccgcatagcaacagcaccgcagagctaattttaagcaacagcatcagccattggctttcaatagaatcatccgaggcatacacaggtttgggtttataaacgctccattcgctaataatgctatccagatcttccggtgcaatggaatccagcactttatcgataatcgcttttaactctggcacttccggccggatagcaaaagccatacctaggggctcttcactcgcgaccgcaacgattttaatattgggtttgaaatcctgcgaagcaataaagttggcggtcatcatatttttcaaaatagcgtcaactttgccctgctgtaaccagcgcaccagcgtcatggtatccggcgcttcgataaaattaattttctgatttaagaatgggttggaaataatattattagagacgctcccggcctgtaatcccacgcgtttaccggccagatcggcgacattattaatatccgttcggtcttcacgcactaatattccccataatgactgggaaaagggcgtgctgaatagcgcatcgttataaaggccatcgcgaactgccacgccgggcagcatatctattttcccagcgcggaaatcttgcagcccttcaccggtattagtgataaaaacgggttcaaatttaagaccggtacggcgggcaatcaaattaatgagttcgacagataatcctgccattttcccggtacgacgatcgcggaatataatgggagccagatcgagcggagccagataagtcacaatcggatgactatgaatccagtctatttcctgctcggtgagcagcattttggcatcgatattgtagtgatgtcgactcccaaaccagcgctgttgaatatcgccggttgcccggctgggcagcaattccagcactacattgagatcgtctatcagcttttgattgctggcttttgccagaaaggaataaggcgccgggtgatagggggcgaaattgcggatttgtaacgtcagcagctgtagctgatcgattaagtagttggctgaggtcgcgttagcgacaaaaacatcggcgttaccataggccaccgccaataatccttgtagttggttgggataggcgacgatattatcattatgataattaaataaaaattctggtgatagcggttcattatttacaatcgctacggtttcaggatggcggcgttgggttgggtcccaatctttgctgcggacttcgacgtgacggttagtgaagaaagcgtgggaggcaattagccccggctgcgccagcatcggcgttcctgccattaaatcaatctgaccgttttctaacgcattgagcaccagcccgtaatcgcagtatccgatcatctggaatgataactgactggaatcactaattatttttagatagtcggcaacgatgccttcgattgaattatcatcgcgattcacgacgaaaggggtgttagcgtcgatcaccacgcccactctcagggtgcggcggctggattggcgcgtatcgatttctggcgttaacagcaggtcatcgctgtaattcttggcgatgctatgtaacgttagcggttggccggtatcacatcccagccggctatttatcggtgcggccagcgcaggcgcgacaagtataaatagcaggaaaaacagccatgtagatggctggctacaccagattgtgggtatgcgcatagtcagccagctcaatcactgaggatagccccagcttggttaaaatgcgggttttgtaggtgctgaccgttttattactaataaacatctcatcggcgatttgtttattggacaatccattgaccagataacgcaaaacgttaatttcccgttcagacaacatgcgcgcgcggttgaccgaatcatggctggaaggttgcccagcgagctggcttaaggcctcggatgggaagaacgaataaccccgcaggacgttttgagcggcgaagagtatttcgctaatgtctttgtttttgctgataaaaccgttggcaccagcttgcagtgcgcgcacggcaaaaacctgttcgtttttggctgacaagaacaacgacttgccggtgaatccacgctgttgcagttttttcaacaaagagaaaccgtcgaagttgggtaattcgatatcaataatcactaaatcaacaggctgggcatttaacattgccagcgcttcattaccgtcggcggattcataaatcgctgagaattcattgttctgcgataataaggcgcggatagcgacgcgaattgcgggatgatcatcgattatcattacagacttcataaatactctccaaaaaacgttattttaaggatatatcaagcatagcatgctgaatttcccggctgacagagacacgaatagtaagataaaagagaccacaattaatgactaccaatccgcaatcaaacagattctaatcactgctaacatattatcaagaaaagaattttttgattacaatccgttattgtttcatcgcgatagccagcttctgatctaaagaaaaatgaatgtattcggcgttgggatttatcttagcttaatcataatgctagattttaaattggaaggaatatataaacttattgataatgaatactattattcagcgattgtgatgcgtttaaattttcccgtcgggtttcgtgtaaacgtaaataaaccgcacaaaaagatcctaacgtaaaacacataagcaaaaaacccgactaagtttccttaatcgggcttctctaatatggctcctctgactggactcgaaccagtgacatacggattaacagtccgccgttctaccgactgaactacagaggaatcgtgtgaacggggcgaataatagcgaggtgagagggggatgtcaaaggggaatacgttaatttcgatcgtttgctcatagaatgcgcaacttattgagattttgtcatttttcgcaccataacccgcctttttttgcatatcaagcagattgtaatccctttgcgagcgccgttaaggctggccatcgtgtatggccaatgagcaaataggctttttggtcggttaaaacgaacatgccgtagggatgaatctgcagaaaataactgtcccccggtgcgggttgaagttgacgatatagcgactgtggagcgccaatttgcatgattttgcctttattcatcaccaatacggtgtctgaaacggcaaagggttcgctttgaacgtgagtaacatgcagtgaagggatattaaactgctgctgcaattcacgaattttatcgcgcatgctgaggcgccggttggcacccagattactagcggctcgttgaataacagtaccttgggttttaggagcaaagcgcgagccagggtcacacgctgttgctggctgccagaaatttgaacgacataacgatcggcaaaaccgcccacacccgccagcgcttctttcacccgatcgttaatttcagcctttgggcgaccaagcattttcagaccgtaaccaatgttttcccctagagacatatgcgggaacagggcgtaggactggaataccacaccaatatcccgttgctggatggaacggtcagtcacatcctcaccgtcaataaaagtttgttcgtcgctgaagccccgacctaatagctgagtaaagttattcagcggcagagtgtcatccgcgcaccagtggatggtgaaactgccgtagaaaatactgccggacagcaagatgttaaaggcgatcccgacatacagcatcgccgtggtaccccaaaccagtatcaccggtagcggttgtacgtctgcgcgagaggagttaccggaaatggtgacgtaggaacgtttagctatccacatataagatcagcggcgccaaacgtaacccttgcggtagcagtatagtggcgttctggctctcatcgctcaggtaaaaactgatggtccaaagagccagtcaactgagggtgaaggatctcgctaagaatagcgaaatccccagtgagcggagccgtagcatgtcagtgagcggtcagcagttgatggtgtagtgcaaagtgaaccagttcgaccgttgtttcacagttcaacttacccaaaatattggcgcgatgaacgtgaatggttttatggctgagagcgagctgatcggcaatggactttacgctaacgccgctgaccagaagttgaaacacctccttttcccgaggcgttaagacattcaactgcttaggttgctgaggcatgtggcgcagcgcttgcagcgcattggcacacagatacagcccgccgccgctaacggatcgcactgcctgcaccagttcttccgggccgcagcgcttagttaggtaaccgctggctccggcatcgaccgcactttgcacaaaggcggtggtgtcataaatgctcagaataatggcgcgaaactgcggatgctgttggcgcagacgcttgagcaggctcaacccactttcatccggcatagagatatccagaaccgcaacgtcaacattggtggttagcagattttgccaggcttcagcggcgctgccgtactcgccgacaatgcgaatatccttttctaaagataataattgagcaaacccggaacgaaccactacgtggtcgtcaatcagcgcgacgtttatcataactttgtaataatttgggagagttataaacatcatgcttatcaattcttgtttgggcaataattgttagtgaaaatgttgagaggttaacaatttaaaatgaagaatgatcgaaggggagaggcacccccctctggcgtccgtaggatttcggcacttgccggagagggatggaagggcgatcaacccagcgttttggcgcgataaattcgctgtggacgtccaaccttgccgtaaatgatttccgcctgtagcgcattgtttgcagagcagaattccagataacgccgagcggttgtgcggctgagccctaaggtcacggccacgttttcggcggtatactcggcatcactatcggcgaataaagcctgaattttatccaaagtgagctgatcgataccctggggcaataccgatttttgcgtaccccgggcgtaggtgttgtacattgcgtcaatttggcgctggctgactttatcgccttcctgcaaagcatgatgccggtgactaaagcgttccagagagtgctctagccgctcgtaagccacgggttttatcaggtaatcgaatacgccgtagcgtaatgcttcagcaacggtgtccatatcgctggctgcggtgacgaaaatgacaccgaaattgctgccttcaagagccagttccctcaggaattctagcccagagccgtcgggcaggtagttatccagcaggatcaagtccggtttaaaacgtgccgccatgctacgcgcctgctgtagatttccggctaaccatacctggcggcaataattgctttgcttgataaactccgcgtgcatttctgccagtggcgtttcatcttccaccactaaaatgttaagccattccatgggatcccctagcttttgagatcataggtctttggaataaagaccgtgaataaagtaccctgcggtgggttcttctcaacggtgatggtgccaccgctctgatgaacataagtcgcgaccaaatataagccgataccgtgttcctctgagtgtttggaactgacaccgcgctcaaacaggctgtcttgcagctcagggtcaataccgcaaccgtgatcggcgacttctagaatcaactcatggccttcatcggataaatacatttcaatatttttatctccatcagggttcttcagactggcttcaaaagcgttatccagcaggttaccgatgattgccgctagctcattttcaccgagagttacaggcagtatgcccaactgacagccgggaataaaggttaagctcagccccaactctttggctcgatggtattttccaaacaacagtgccgcaatttgccggtttttaaaggtatcgcgcagggtatcaatgagcgcctgctgggaggacgattcggtttttaccatctccagcgcgcgatcaaactccttcatttgcaataatccgctcagagtggacatccagttgagatgttcatggcgaacggtacgtaaattttcaacatactgctttatctggctgagctgtgcgctgagggtataaatatcatcctgactgcggaagctgaccacccagccttgaaaaatatcatcagtccaaataccggcacggtttgcgatgatatttaacccattaaaggtacacaactcatcctgtcggtttccgccttcccgatcgaggaagaaatgatccggagaaaccacttcgctaacgctacggccaaccaattgatatggcgtggctgatacccgtaacattttacgagcgttttggttgattgccgtgatcttgccctcaggatctaccgccaatagtccttcaaacaccgccccaaacagggcttcctgctgacgaagtacccgcgcgatctcctttggttccattcccatcatttgacgacgaatatgattggaaaacaaccaggcaagaaacaacagggtaatcaaaataataacaaaataactggtgaggggagtgagataactcaaacgccagtgatcgattttactgattagatagccgagggacactacgccgataactttgccatcgctatcaaagatcggcgttttagcccgcatggctttccccatcgatcctttgccatagatgatgtagctctcgccgcgttccagtgcgccttctttagtccactgcatcggcaggccgattttgtccggattaggatggtaaagacgacgggaattggcatcgccaatcacaatgtagtcaaaatcggagctggtgcctagccgtgtaacaatttgggctaagcgttgttggtctcgctgcttgaccgcagaaaccacggagtccatagaggcaacaattttggcctgattcatggccattttactgacctgattgatcagatattgttcgaaactatgggttagaaagcgatccattgccccgatcaggataacggagaaaaccaatagcattaaaaatatgcgcagcgggaaggcaatgttctttaatccacgccatttaaaaaaatgggctttaccagaaagcacgttattcaccttttatggctgaatcaaataaaacgacgagtaacataatttaaattaaatgattaatgcaaataaaaaatcattatctctaattaaatcaattaaaatcataaaataaattatatttactaaattaactgtgaattaggtcaattaaccgagaagtttttatgtttagcatatatttctgaacagggctttcaaaaagtaagaataagaatttataagaattttaatgcgttaattgcatttatacttttaataaaaagtcatgattcatctgttaattgcatatgtttattgtgttttatttgttatttaatggttattccagagagaaaattatggatagggtatttaggataattaagcgttcagaccatcaaaggattgtggaaataacgcattttttacgtgaaaacgacttaaatattgatacttccgttgaggtgtttattaccgtctcagtagatgaaagattggtagcctgcggtggaattgctgggaatattattaaatgtgttgccattagcgagcaggtgagaggggaagggctggcgctaacgctggcaactgaactcgtcaacctggcctatgaacggcaccacagccacttatttatctacaccaaaattgagaatcagtccttatttaaacagtgtggattctacccgattgccagtgtgcccggcattgtggtgttgatggaaaacagttcctgccgtctgtctcgctatgcgcgccagctctcgaccttacgccagccgggcaagaaaataggttccatcgttatgaatgccaacccttttactttggggcatcaatatttggtacggcaagcggcggcgcagtgcgattggttacatctatttttagtcaaagaagataactctcgttttccttatcaagatcgcctgcaactggtactgaacggcacaaaagatattgccaatttaaccgtgcacgccggttcggaatatatgatttcccgcgctactttcccctgctatttcataaaagatcagggggtggccgacgattgttataccgaaatcgatctgaaaatctttcgtcaatatttggctccggccttgggaataactcaccgctttgtcggcactgagccattttgcaccgtaaccgccaaatataaccgggatatgagttactggctggaaacccccgatttaccttatccgtccatcgagctggtggagatcgagcgcctgaaatatggcgcaaccgctatttctgcctcgtgggtacgcaaattactggcgcagggggataaggacaccattagcaagctggtacctgccgcgacctgccactacttacaacgactgctggctcagcctgcaaaagcgccggtcagcgcggtcaacaaatctgtatttcaattaggtgaataatgaaaattatccgagaagcggtcgccggcactttggagtcgagcgatgtcatggtgcgaattgccccccacgatctgccagaagtggatttgctgatcaacagcagtgtggagaaacagttcggagaagccattcgcgccagcgtattggcattactggatcaactgggattaacccaggtgcaagtgattattgacgataaaggggcgttggattgcgtacttcgcgcccgtttggagacagccttgctaagagcctgtgacctgccgcacctgccctggagccaaaaatcatgaaaccagagatgaagcaaagaatgcgtcgcagcatgctgtttgttcccggcgccaatgcggcgatggtcagtaatgcttttatttatcaggcagatgccatcatgttcgatctggaagattcggtgattctgcgggaaaaggatgcagcacgccgtttggtcttccatgccttacagcatcctttatatcaggaggttgaaaccattgttcgagtcaatgcgttggattcgctttacgggctggacgatctggaggcggtcgttcgcggtggcaccgatatcgtccgtttgccgaaaaccgatgatgcgcaagatgtgattgatatggaaagtgaaattgcacgtatcgaagcggagtgcggccgggaacccggcagtaccggtatgctggcggctatcgaatccgctcaggggattactcaggcgttggcgattgcccaatcttctcctcgtttgataggtattgctctgggcgctgaggattacgtgcgcaatttgcgtaccgaacgttccgcagaaggtgttgaactgttgtttgcccgctgctccattttgcaggcggcgcgagcggtgggaattcaggccttcgataccgtgtattccgatgccaataacgaagccggttttctacaagaagcggcgttaatcaaacagttgggttttgacggcaaatcactgattaaccctcgccaaatcgaattgctccataacctatatgccccgacacaaaaagaagtgcgccatgcgcaagcggtggtggacgccgctgaagcggcagaagccgaagggcggggtgtggtttcgctgaacggcaaaatggtggatagcccggtgattgaacgcgctagggcagtcttgcaacgagctgtgctttccggtttacgcgacgaataagagggaattaatcatgaaacgccaacaacgggttgatgccctaagtcaaaacccaaatctgaccgtcacgtcctatcgggaagcgtctaaagccaatttgcaggctcaaaaaccgagggatatcaagctgtgtagctcactggaaaaggcgattcgtcgctctggtttgcaggatggcatgaccatttcgttccaccatgcttttcgcgcgggcgatatgacattgaatctggtgatggatgccatcgctgcgatgggattcaaaaatctgacgctggcatccagttctctgagtgagtgccatgcgccgctggtggatcacatccgtaaaggtgtggttagccgcatttatacctcggggttacgtggcccactggcagaggccatttcgcgcgggttgctagcagaaccggtacaaattcattcccacggtgggcgggtcaatttgatcgaatccggcgagctggcgatcgacgtggctttcctcggtgttcctgcctgcgacgcgttcggtaacgccaacggttacacaggcaatgcctgttgcggttcgctggggtacgccaaggtggatgccgattacgccggtaaagtggtgttattgacagaagttattgttccttatccacataatccagccagcataggccaggatcgggttgatctgatcgtacaggtggaacaggtaggggatgccgataagatcggcgcagatgctacccgtatgacctcgaatcctcgggaactgctgattgctcgccgtgcggcggaggtgatcgctggctccggctattttaacgatggcttttctgtgcaaaccggcaccggcggagcatcgctggcggtaagccgcttcctcgaggataaaatgcgccgccgcaatattaaggccggtttcgctcttggcggcatcacctccaccatggtggacctgcacgaaaaagggctgatcgaaaagctgctcgatgtgcagagtttcgatcgcatggccgcatcctcactggcgagaaatcccaatcacattgaaatcagcgctaatcaatatgccaatttcagctccaaaggcgcgtctgtcgatcggctggacgtggtgattttgagtgcgctggagatcgataccgattttaacgtcaatgtgttgaccggctctgacggtgtgctgcgcggagcctctggcgggcactgcgataccgccgcggctgcacggctggcgattatcgttgcgccattggttcgcgggcgtattcctacgctggttgatgctgtgaccacctgcgttacgccaggctccagcgtagatattttggttaccgatcatggtattgctgtcaatcctgcgcgccccgagctagccgagcgtttgcagcaggctgggctggaggtcgtcactattgattggttatatcaacgagcgttgctactcaccggtcaaccgaaagccattgcttacaccgacaaagtggtggcggtggtgcgctatcgcgacggcagcgttatcgacgttgtgcatcagattcaggaataagcgatggatatcttttcaccgggtttggcggcgaatcggaatatcagcctgccggagttattaactagccgggaggcacgctatgcccgccagcgagcatggctgatgcgttatggcactacgttgatttcactcaccgtggttgcccccggggcgttgaaagacagcccgttaactcgccgaatttttgggcgggcatggcaaacggtgacggagctgacgcggcaacaaggttgggaatccttggcgcaggaggctttcccgctaccgaccggttgtgaagggttaattgctctgaatcaacccgctgaagcggtaaaagatgcggcgctactgcttgagatgaagcacccgttggggcggctgtgggatatcgatgtgttagatagccacggacggattttgtcccgtggggatgtggggttggctccgcgtcgttgtctgttgtgcaaccgcccggccaacgtgtgtggtcgggagcgaacacattcagtggatgaattgttagttcaaatggagtggatgctcgatgccgctattgcctgttgataacgcattcccgctgacttttcagctacaggactatgccgatctggcctatttcgcgctattggctgaggtcaatctaacgccgaagccggggttggtggatcgctttaacaccggtgcgcataaggatatgaatctggatgatttctatcgcagcgccgaggctattgcaccttggttttctcgctttatcgagcaagggatagccactgagcacctgcagggagaggcggcattgtctgcgctgcgcccgctcggattagcctgcgaaaatgccatgttccaggctaccggtggggttaatacccataaaggtagtgtgttttccctcgggcttctgtgctgtgctctggggcgtttgtccgccagaggcgtggctatcagcgcagatgccgtttgccaggaagccgcccaactgtgctgcggactgacggaaagggaattacaacgcagaaatctgcaacaaactgcaggtcaacgtctgtttactcaacacggtctaacaggggccagaggagaggcagaatccggctttactaccgtattaacccacggattgccggtgtatcaacgcttgttaaatcaagggatagatcaggagtgcgccttgctggaaaccctgctgcaactgatggcggttaacggtgataccaatgtggtgtctcgtggcggcatggcggggctgtactggctgcaacatcaggctgcggagattctggctaacggtggcattaaaacgccattggcaaaggctcggctgcgcctgttcgatgcccaatgtatcgctcgaaatttgagtccgggaggaagtgccgatctgctgattttaacctggtttttggctcatattcccgatcgtccaccttacaaacacaataataacaatgctataggagtatctctatgttgaagtcacaagagaagatatggaaagcccttgctccctttattgttctagggatcttgttattaattcccacaccagaaggtatgccaccgcaagcctggcgctattttgctatttttgttgccatgattgtcgggatgattttagagccaattcctgcgacggcgataagctttatcgctgtgacggtctgcgtattatctgccgactgggtgctattctcgccggctgaagtggccgatagtagctttaaatccggtaaagaagcgctgaaatgggggctggccggtttctccagtaccacggtgtggttagttttcggtgcctttatcttcgccctcggctatgaggcaaccggattaggccgacgcattgctctgtatatggtcaaatttatggggaaacgcacgctgacgctgggttatgccatcgtcatcatcgatattctgctggcgccgttcacgccatcgaatacggcccgaaccggtggtacggtgtttccggtagtgaaaaacctaccgccgctgtttgattcattccccaacgatccgtcctcgcgccgtatcggcggttatttgatgtggatgatggttatcggcaccagtatcagttcttccatgtttgtaaccggtgcggcacctaacgttttaggcattgaatttgttggtaaaatagccggtgttcatattggctggatgcaatggttcctcgctttcctaccggtaggcttgattttgttgatcgtagctccgtggttatcttacgtgctgtacaaaccgggcgtgactaaaagcagcgaagtgtctacctgggccaataccgctttacaggaaatgggttcgctgacgcgtaaggaaatgacgttaataggattggtattgctgagtttgtgtttatgggtcttcggtgccaaggccattaatgcgacggcagtgtgcctgctggcggtttccctaatgctggcgttgcaggtggtgtcgtggaaggcgattacgcaatattcgagcgcctggaacacgctggtcaatctggcgacgttagttgttatggctagcgggctaactcgttccggttttattgattggtttgccgataccatgagcacgcatctggacggtttctcacccaaaatgaccgtggcggcgttagtgctggtgttctacttctcacattatctgtttgccagcctgtcggcacacaccgcaaccatgctgccggtcattctggcggtagggaaaggtttgttcggcgtacctatggatcatctgtcgatgttactggtgttatccatcggtattatgggtgtattaacgccttatgcgaccggccccggcgtgattatttacggctgcggctacgttaaatccaaagattactggcgattaggcggcattatggggctgttatatatctccatgctactgctggtaggctggccattaatgagtttgtggatgtaactcgcaaacagaaattacgggcgttggtgtgtatccagcgcccgtttggcgttcagacttgcattcagtgtttcattaagagtatttatgcgaactttaacgccttatagccatgttataaaagtggttatgtcggtgtcaaagcgcaaacttagtgctaaacgggtaattaatctttaaaacgcggcataaatcacggcatgtttattgtgaccatcctcctcagctactactataaaatcccttttggcgatttggtctgattatcctgtgaaccctgtttttattcggaactttgccttctcctccatcccggctgtcggcctaaatggtcaggcaccttatgagggattactggggaaatgtgattttgatgtccatgcctatcaggacaatctgtttgctgtatacggcattgcctttcctcccagcctgcaaaaggcggtcaccaagcggcgagcggagtatctggccgggcgctttgttgccaggcaggtactcaatatgcttggcccgagggactaccatttggaaaacggccccgaccgcgcgccctgctggccagacggcatccaaggcaccctgagccataatgacaaccgggtattgtgcgcggcacaaattattccgttacgcctttctgccggcggtagtggcatagggttagatgtagaaagctggattggttcggatcggattgacgaaatctggccgggcattattaacgatgcagagcaccatcaattacaacgtggacctctgccgtttaataaaatgctgacgctgacgttttctgccaaagaaagtctgtttaaagcgatttatccgcagttacgctgctattttgattttttggatgtgcgtctggtgggatgttcactggagtcaggccgctttgaactggagttattgcgagaactgagtccggaatttaaggcagggcgtcgttttcaaggctgttttaaattgatggaaactgacgtgcgtacttttgtggcctattaaccgcgattgtctcctctttttgcgcccgtgtttttcctcatgggttcaattaagccgaaaccttgtggtctcggcttttttaatgccaaaactaaatcgttaagctctatgggctgatataaactggactcagagtttctattcctgaagctccggtgtctctgcgtgggtacggcagaagatgaattaatgtctggcgtcattccgaaccctctgttttaaacgtttcacactggataataaatttacaaggacacaagtggtgttcatcctgtcactgcgatggggtagtctggtgttgttaatgaatgctgttagccaatctcattctagatttgactttttattgttataggtaatcatcgaaaaatcagcgatgtaactggaggttctccctaggttttcccttgaatgcttataataagttaacatacgtttttatctccctggctgctcaacaccttataaaatcgcggaaacaattaactctattgcgataattaaagtgtgtcggcattatcccgaaaagtatttcgtctaaaaattttcctatatagtgaaaatataaccttgatggatctgtaaaagatagagttgtgattaatataacgaacggacatgttcttcttgttgtttactttgtaagatttccctcgcaaagattgtaattcaaaatcatcactaattagaacgactttcttttttaatcgactgaatagttgatggatgttgttattgtttatcgtcatctctctttctggccaaaccaaagtgagtaaatcatccctatctattagctgaccgtttgacgcatgattaaccagtgcgataaataataaatactctttattcgttaactctacactacctttcaggctatacacaatcttttcatctgccactacaaaatacatcatggttaattcctcctgttagcccaaaaaaacgggtatggagaaacagtagagagttgcgataaaaagcgtcaggtaggatccgctaatcttatggataaaaatgctatggcatagcaaagtgtgacgccgtgcaaataatcaatgtggacttttctgccgtgattatagacacttttgttacgcgtttttgtcatggctttggtcccgctttgttacagaatgcttttaataagcggggttaccggtttggttagcgagaagagccagtaaaagacgcagtgacggcaatgtctgatgcaatatggacaattggtttcttctctgaatggcgggagtatgaaaagtatggctgaagcgcaaaatgatcccctgctgccgggatactcgtttaatgcccatctggtggcgggtttaacgccgattgaggccaacggttatctcgatttttttatcgaccgaccgctgggaatgaaaggttatattctcaatctcaccattcgcggtcagggggtggtgaaaaatcagggacgagaatttgtttgccgaccgggtgatattttgctgttcccgccaggagagattcatcactacggtcgtcatccggaggctcgcgaatggtatcaccagtgggtttactttcgtccgcgcgcctactggcatgaatggcttaactggccgtcaatatttgccaatacggggttctttcgcccggatgaagcgcaccagccgcatttcagcgacctgtttgggcaaatcattaacgccgggcaaggggaagggcgctattcggagctgctggcgataaatctgcttgagcaattgttactgcggcgcatggaagcgattaacgagtcgctccatccaccgatggataatcgggtacgcgaggcttgtcagtacatcagcgatcacctggcagacagcaattttgatatcgccagcgtcgcacagcatgtttgcttgtcgccgtcgcgtctgtcacatcttttccgccagcagttagggattagcgtcttaagctggcgcgaggaccaacgtatcagccaggcgaagctgcttttgagcaccacccggatgcctatcgccaccgtcggtcgcaatgttggttttgacgatcaactctatttctcgcgggtatttaaaaaatgcaccggggccagcccgagcgagttccgtgccggttgtgaagaaaaagtgaatgatgtagccgtcaagttgtcataattggtaacgaatcagacaattgacggcttgacggagtagcatagtgatcggcacgtaagaggttccaactttcaccataatgaaataagatcactaccgggcgtattttttgagttatcgagattttcaggagctaaggaagctaaaatggagaaaaaaatcactggatataccaccgttgatatatcccaatggcatcgtaaagaacattttgaggcatttcagtcagttgctcaatgtacctataaccagaccgttcagctggatattacggcctttttaaagaccgtaaagaaaaataagcacaagttttatccggcctttattcacattcttgcccgcctgatgaatgctcatccggagttccgtatggcaatgaaagacggtgagctggtgatatgggatagtgttcacccttgttacaccgttttccatgagcaaactgaaacgttttcatcgctctggagtgaataccacgacgatttccggcagtttctacacatatattcgcaagatgtggcgtgttacggtgaaaacctggcctatttccctaaagggtttattgagaatatgtttttcgtctcagccaatccctgggtgagtttcaccagttttgatttaaacgtggccaatatggacaacttcttcgcccccgttttcactatgggcaaatattatacgcaaggcgacaaggtgctgatgccgctggcgattcaggttcatcatgccgtttgtgatggcttccatgtcggcagaatgcttaatgaattacaacagtactgcgatgagtggcagggcggggcgtaatttttttaaggcagttattgctcctccttaaaattagaatgcccgcaatatatcgcaacaaaagtaattttgtaaggctacccttggttattgtttgttaatattgatgagcttcatatttttaccaaatataacgtaataagttgttgttgtaatgctttgctgctatttttttatatttctttagccagtgtaattagcttattatttaattaaacatagcgatattgagcttatcttattgatccttcttattcgattgaactaattgttcaataatatgaacaaatacatgtgcaaaaatagaacgcttgtcccctgtgtttacagagtttctctgtcatttcgaagattcagatattacttcattgctgcttttatcatcaggtaagtgtgggtgagtagagtgattatcttcataaatgactaaatccaatagacgcagatttatattaatcttgagcctgcgtcattctgacgttaactgcggcttagcatcaataatagagagtaatataattcttatattgctattcaagctgattataaagtatttaattttacacatataattaattaagttgcttatagatggtgaggttggtttgttgtctttatgtaattaatcacaaaaataaaattcaattactaagtatcaaaaaactataaatatcgattagattatgttcgttagctcaaatcaacgggcttgaggttacctggatgaataaaatggatgttcaatgaaaaccttcagttagacaaaataaattctttgttctttgtatttaaaacaccaacggaatccgttaatggcagcgagcaggatttatatttttgctgcttttatctgctttctcagcatccaagatctatttatcacgaatggggagggctatgaaaaattatcaggaaaaaggctggtgacggccagattaaagggacgaggccgtaatggcgaatgatcctcagtggtttaaacagtacggaaatcagaaaaacacgattgttcgctggcccgtaaggccgtgaagaacaggatggggaggggatatgacgttaaagattccgactgatacacaggcaattacctggttaattattggccttttttcagcttggggaggtgttgtgagatatctcatggatatgcaagggcacagggggagttggagttggatgggaataataagtcagatcattatttcaagcttcactggccttttggggggattactcagctttgaaaatggcagtagtcattacatgacttttgctattgcaggcttatttggcaccttggggagtacggcgttgagttacctgtggcggcgtttcttggggagtccggagaaaaatcgtgggtaactttacttttagtcaaatcagtcaacgcaatctacaaggcatacacccggatctcgttcgggtggtgtacctggcactcaaattgtccgaggtggattttcgcgttatcgaagggctgcgtgatagcgcacgtcaacggcaaatggtgcttaatggcaagagccaaacgctcaatagccggcatcttaccggtcatgcggtcgatttggcgccttggttcaacaacacgattccctggaacgattggggagcgtttgctcaggttgcagcggcgatgaaacaggcggcgaagcaactacaaattcctgtgatctggggcggtgactggacgacgcttaaggatgggccgcactttgagttgccgaggatgcagtatccatgagtctgctcagtgttttgaaacgtggtctgctacttgccacgctatttgcggttttggttggcgggctgtgggttgctcaactgaaaaagaccgcgacattactgaattctgaaaatatcagtctgacgcagcagaatcagctttatctgcaacggttgcaaggatatgaccagcagatgaaaacactggatgaggcgttaaccactaatgccataactcagcgtcaggcagaggagaaatatcatgcgatcgaacaacaaatgcggcggctgctggctaatagccgctgcgctcgggagcctgtgcctgatgctgttatccggttgcagcaacgagcacttggccaaagcctgcccggtgcagccaatagtaccgaaagcgctgctattgccccatgatcccccgttatttaacgtcacaaagtggggggactatcccggttatgtggaagaattaaatctatcgttggcgcgttgtaatgcagataaaacggcggtggcccaaataatgtctccccaaaaaggataaatctctcttttagtcaattcagacaagggcattgactctataagattggcaaacatggatttaccgattttgtactcaatatcgaggcgctgccgtaagcatgcctggcaaaagcaggataataggttattggttgcgaaagaaacacggcggttaggggcgctcttcgctaggatgacagtcaagcttactgcaaaaagaaatctatgctggcacaaatccgatggcaaaaagtaggcgcgttatgtttcgctcttggtgggctgcaatatatttttgctttcttttttcttatcagaacaaggtttcatcaaatcgcttgaaagagtacttaacataagttatcgagagcgtgtatatagtattatatatgataacttacacgcggggtgtaacttaaataaggctgcagacttattaggtataagttctgcaaccttaaaacgtaagttgcaaatggagaatacaacattcacagcaatattattagatgtaagaatgaaccatgctttaagtttattaagaaattcatctctttcaatttcacaagtgtcttataaaagtgggttttattctgtatcgaatttttgttcaaaatttaaacgatattttggtttgtcaccaaagcaagtttcgaagaaattaaccaagaacattaaacttgaagttttgaagttttgaagttttgaagttttgacatccttcctgccctaaatgatagggattcctactgcgttcaggctatcacctgaattatttcggtgggtttactagaggcgagaacagagatgcttaaactgaaagcgcagcctaaacttgctgaggaagaacgagatattctgaaaaaggtagcgcggtactttgcaagagagccagactaaggtaccgcttcatcaacgatcaccaagatgtctggtcgatcgcagctacgcgcacctggcaaggctggctctacatgttcgtggtcatcgatcttttctttgcgtgtaatttggtaggttgctcaatgaaaccgacgctgtcacgtgaacttgcactggacgtattgctgatggccgtctggcggcgtatacctgcggaaagcgtcattttacacaggatcccagaactgtcagtatggtagcgatgactggcaacggttcagctgggacaataaccggatccgagtataagtcgacgtggcagctgctgggataattgctgtggtagaattgttcttcagcccctaaaaaaagaacgtatcagaaatcgaatctctaaaaccagagacatggcccaggcggatagcttcgattatatcgaattgttctacaaccttaccgacgccaccgtcatgtcgagagcttttaataactttcattagtgctcagaaaagcaagataatactttatttcaaactcttaaagtgtttcaccacaggccagttgttcagcgatgcatttaggtgtattcccttggcctgtccacgtccttttctcacctttttcatcgagatactcatatttttacgggctccggggcttcctatatttatgggtaatgccaacgccagcaaccaatgctaacgggtcagttccgtcttaactgtgtctgaaagtatggggatatgctgtcaatggagaactcaatacctagattgcgggtattacctaaggcttctttcagccagttgcgcgcggtgtcgtcggagatctcccatactggttccgtcccatagcgtgtgaaggtcgctaagtggtcgcgccgccgtcgtgaaaactggcatcgagcagaggtatcgttcttttcacaggcgtatctttgccgtgcggccgggtttaccggccgtatgatttttctgtttcaaatagcgcaggctttcggtataaccgatgaaaagcaaaaaacccgactaagtttccttaatcgggcttctctaatatggctcctctgactggactcgaaccagtgacatacggattaacagtccgccgttctaccgactgaactacagaggaatcgtgtgaacggggcgcataatatccagaggcacctgaactgtcaacgctaaattcagtagaaatgcgcgtttgctcagcatctgagcaaaaaatgcagattcggttggaaaaacaaatgctagcgttgaaaaattcgtcaatatattgaaatcagatgaaaaattaccgttagctctctgtcagctggctttcccatcttttcagacgggcgagggggtcttgcaaataaaaccgacagaaatggtgataaactgccgggaagcgtgaggctaaaagctccggcgcgctaaagaaatattctgaaagcacagcgaaacattccgccggatcgctagcggcataggcatccatactggctccctcaacgccgaccatatcaatctcgtcctgaatattatccattgcgcggtgtaaatcgaattcccacgccgcgacgtcacgcatgggaatgggagggacgccgttggaattaccgccgttgcgcatatccaatttgtgagccgcctcgtgaatcaccagattaaagccggagagatcgaaagaatcttgaatatcctgccagtttaaaacaatcggcccctgttcccagctttgtcccgactgcaccgtttggccgctgtgcaccagccccagatcatcctgccagtcgtcttctacgataaatggggcagggtagatcaggacttcgtgaaaaccatctaaccaccgcgcaccgagttccatcaccggcagagcaaataacagcgccaaacgagcctgcatcagtgcggttaactccaagccctgcaaaggtaccatgcgtttctgctgtaaaatctggctggcgacggtgactaaccgttgctgctccgcttcatccaatggagaaagtaaaggaatagccagtgcttcatgccattgcatcagcacttccgcttgcggttgatttgctttccacagccacttcatcatcgtgtcgctcgcaatgtgatttcttgggtaccaaggcaggatgttgtaaacatgccgtaaaaaagagcatgatggcaactataagcacggagagatgccggagcggctgaacgggacggtctcgaaaaccgttgagggggaaacccctccgagggttcaaatccctctctctccgccactattcaatcagttaggcgagattttttcagcgacccgcatcacagttagtctattgtcgatatgtcgggctgccatatttatgggcgacttcacttttttattcggtcaataggtgtccaaaatcagtgaaatattatttcactcgagcgcccggtaatcgcttatcctacgatgtaacacaaatggctagctgggctacgtgcttgggtagtaaaaatgatgagcggtgttttgtttataagtaaaatccaataggactacttagattatagtagactttgaattttcatataacctatagcgcgagccacgcggctacttaaatatggactaagagataattaacgcttgggggcgaataaaaagaatctctacaatagaaggcgtaggattcaaaaacggcgcggaagcgactaatgaaatcattcaatctggtatctaacctaccctcttacatactgatattttagaggaataattactcaggcgcttgacccggaaagcttactcagacagaaagcgcacttggctagatatgcccgcccattgctgctgatttgaaaaatctgctgtcggaagaataggtaaggaatatccagggctattcagaaaacgtttagcgcccaatctggaagtttctgtaaccgctatagaaaaaaagtctgctaacaggcggtgatataacttatcgctttaacctatggaatttaattgcttatatcacggtaacttactttaccttcaagtttcttggtctatctttgctaagctaaatagataaactaaaggagcataagaagatgcaaattccccctaaacctccgaatgagaacgctcgtattgcgacactgctcgcttataatattcttgatacttctcccgaagaacgttttgatcgaatcactcggctagcaaaacgcttatttaatgtccctattgccttgatatccttggttgatgttaaccgccagtggtttaaatccagcgtaggtctggccgagtcggaaacatcgcgagatatctcgttttgcggtcatgcgattttggaagaggggattttgatggtgcccgatgcgttaaccgatcagcgcttttgcgataatcccttggtgatcgatgcaccgggcattcgtttttatgcgggttgcccgttagtggtgccaaacggtagtaagctgggcactttgtgtctgattgatgtagagccgcgctctttggatgaaaccgatcagcagctattatgtgatctggcaaaaatggctgagcaagaaattgccgcggtacaattggctactattgacgagttgacgcagttgaccaatagacgcggtttcgaaatattggcacaacatgcgttaacttattgcgtacataataatattccggccagcgtcgtgttttttgatcttaataattttaaagcgatcaatgataattttggtcacgccgaaggtgataaagctttaatgactttcgcggacgaactgcaactattcttcagtgagactgacatcgttgcccgcttagggggagatgaatttgtggcgctactgacggcatctagctgcaaagatatggtggacatactcagtcgctttaaaattgccttagagcaaagaaatcgtcgtgaacgacgagggtatgatatctgtttcagcgtgggttatgctaactgcgattttgataagttcactacaataaaagcattactagctgttgcagattcttctatgtatacacataaactagagttacgcgataaacggaaatctcaacataagaactgagctaatgtttcggttttgctgtcatggtttgaatcaacaagagtgcaaatatcctttggaactacgttatcctatggcaatcgttggtctataaagataaaaacaactgacgtacgcacgaaatatttaaaatgaactaaataaggttaataaattagccagtatctctactagaaggcctcgcttgaacgaggctttgttgtttaataaacaggaatagttaatcccaccctattgcattattctcaatcaacaatagattactaatggcacttcggttatttccctcaaccggagggatgtatttagttatgtagatcatcggtcaacgatatcgatgagacactctaggcctatctatagcaaacaatttagctccatttcccagtttttttattcattgagatatttgcacggtatcgctcgaaaattagccagataggtcgtggcttaacttgatgaaaatgcatgcaaattaggtattaagatatacattattcatctatgttgtttaagattttacatgtaatattattttgaaccggccaatccagcaccgtatagcatagataagaatcgcaattaatttttaattaaggaatagcatcgaatgaagcagacattaagatattcgacaatagccctttcgttattcggtgctttaattttgaccggatgtagcccggataaaaagaacgataatcatataaaagttggtattagcgcaggtatcgatcagcctctttgggatgtggtcaaaaaaacggctaaagataaatacaatctcgatgtggaagtggtgacatttacggattatgtcttaccgaatgaagcgttaagcactggcgatatagatgctaattcattccagcaccggccttatctggatcgccagactgcggagcggggctataaattagcggttgttggtactacctttgtttatcctattgctggctattctaaaaaaataaaatcgctggctgaattgaaagataatgctcaggttgctgtaccgaatgatccaactaacctcggtcgtgcgctgctgttattacaaaaagttgagctgataaagctgaaagatggcgttggtttacttcctacctctctggacattactgaaaacccgaaaaaattgaaaatcgtcgagattgaggccgcgcagctcccgcgttcactggacgataaaaacgtggctcttgccgtaattaacactaattattcgagtcagattggcctaacgcctaagaaagacggtctgtttgtagaagataaagactcgccgtacgtcaatattattgtcgctcgtgaagataataaagacagcgagaaaatcaaaaatctggttaaagcttatcaaaccaatgaagtcgtggccgcagcagataaaatttaccatggcgatgcagtgaaggcctggtaataatttaaggtgaaaagtctggctgctttagtcagtaactaaaaatagtattataaaaagaaaagcactcacccattattaggtgagtgcttttttactacatgtgttttttagcgaatgacaaaatgtcttgtttgaggtcggttacttttttctctggagatttcttgcaaacttcaacgactttcggtgtgactagcgtgtcagtttcctggaaatctacatagtcaccttgcttatattccgtggtgtcatttaacacccaaaatacaactggggtgtaagatttaggatttaagtcaaggaactctttacaagtcatatctgcgggagtcgttgctgcgaaggtggttgcagcagcggagagtaataggcttgtcagtgcgatttttttaaatgaattattaaacatactgttttcctttttatctctaccttgccaaggacaatttatatttacgctaaaaaacccttgttagcaggagtattctgaacccaaataagttcattggtcaatatcagaaaggaaattctatatatattgatgatgacaggtaatcatcaataggccaaggtgattttaaataaaataaattagttaataatcaataatttaaataggttcatggtcatattccatgtatggattgtttttcttatctgtaaacttttgtttaaattgtaaatcatagattacacgaaattctaaaggggggctattttaaccatttaaatttggcaatattattttgcattttgcattttgcattttgcattttgcattggcttttaaattaaatataagaccagaatgaattggatagttgaaattattaatatgttagcgaagatgcaacaattgcatcaccttaatagtaaggaggttacagaagccggctataaataacaaagcatgtcattatctaacatggggcaaattcattaataaaaaataatatacattcgcattttaaatatattagtgaatcatgttgttgtaatcacagttctcaaccatactcctcgtgataaagtttattatgagtggagcgggggaatgataacgataaagcggaagctaagcttatctgcaatgatattaacatttatcggcagtgctataactatcccaaaagtagtggcggaagaagtgggatatacgctggaaaaagtggtgatattgagccgccatggcgtgcgatcgccaactaagcaaacggaattgatgaatgaggtcacgcccgataaatggcccgaatggccggtcaaagctgggtatcttacgccaagaggtgagcagctagttaagataatgggacacttctacggacaatatttccgtcataccggattattgccgaaggaaagatgcccggctgaggggcaggtttacgtttattcagatattgaccagcgtactttattaactggtcaggcgttaatagacggaattgctccccagtgtggatttaaaatatttcatcagaagaacttaaagcagatcgatcccttgtttcatcccgttgaggctggtatctgcgctttaaatgcaaaaaaaacgcaggaagcaatagaaaagaagcttggcgcacctatcacgacattaagtcaacgttatgctaaatccctggccttaatggggaaggtactcaatttttctgcttccccatattgtcagaaaatggaaaagcaagggatggattgtaattttgccgatctatcacctaacgaagttcaggtaaatcaggaaggcagcaaggcttcattgagtggcccggttgctttgtcttctacgctggctgaaatatttctgctacaaaactcgcagggtatgccgatagtggcctggcatcgtttgctgacgagagaggattggcagactctgatgcttttgcataactcgcaattcgatctcatggccaaaactccttatatagcacagcataaaggaactcctttattacaacagataaatgtggcgcttttacagcctgagcagggaaaggctgggctagataaacagcccgcgactaaaaaaacgctaagcaatactcaattacccgataacaatgcggtatttattctaggtggccacgataccaatattgcaaatgttgccggaatgctgggtttaaattggacattaccgctgcagccggataatacccctccgggaggtggattagtttttgaacgttggcgagatcagcatggacaaagcttcgtggcgattaaaatgttctaccaaacgctaaatcagctgagaaatatggagaagttggatttgtcgattaacccagccggaatggttagcatcgatattcctggttgcgaaaatgaaggtgaaaataaactgtgccgcttagcgacgttccagaagaaagtcgtcgaggctattgagccggcctgtaatctgccataagtgatagcggcgtaataaaccaataaggccactgtaatgcaggcggccttattggtggttacgagagtaaagtcagatgagagattgaaatcttattaaggacgttattggccaagacgaactagatcaaaaggcacataacgttcgcaggcgtgttgtaactcaacacactgagcgcgctcggcctcaatatcagagagtccatcagcatgtattgccttcgcaacatcaatcaaacctgactgtgcgaccataacgcgatgcccagggcgaatttggtttctatttctgtcatagactttaaccatattgacctccagttaatcctgtcaatttgcggctataggctacttatcacgcccctaatttctttgcctcagatcaaaaatatttaattttttatagctgagttttatctactgacccaacagcgaatggatatgcaaccagaaaggaaaggtctgactgccggattgctattaaaaaagctttatagaaggtaacaaggattgcagagcataagcacaacgagtttaaatcaggtttggtacgtatgagtcattggattagggtgttcagtgatgactttcggttattaaccatctcgacttatggtctgacttaacaaaaatgtatagttcaaatgactgatttttatctgtaaacaaacttatatgctattagtgtgatatattagcttgctatttatgagccgtactggtttaatgcgtcatcggtttggaacacagaccttatgaaagcagttttagtaaagcagttcacagtattagcgttatcctcaatagatacctcttcaccgcgaaactccttcttaagtgccccataagaaataactgaaagacagacctctcttgccttatggcagcttaaataaatgaaggaagtatcgctatgtctaataaaatgactggtttagtaaaatggtttgacgcgggtaaaggctttggttttattaccccagcggacggtggcaaagatgtattcgtgcatttctctgctatccagagcaacgattttaaaacgctggatgaaggtcagcgcgtagagttctcgattgagaacggcgcaaaagggccttcggcggccaatgttgttgccctgtaaagacaggcaataacggctaattatcaggttagaaatccccggtttttgctctgatatgaattgcccaaataaagaacgctttgcgcgagataccaagtttggagatccttagatcgatccttaaactacggtactatgacggctcctatgactaggagccgtttttttgtgctatttttcaggttagtgacaactttcattgctacggtattcttcgtaaaaatcattccactgaattaatttatcacagcctgtttaagcacgttagaattcgcagggctaatctcaaagagaatagagcaaacagcgacgtgggaatttttataaagaaacgccctcgtctatcaagactgagggcggcaaagacttctattcgaaaaaaccagcgccattccagttaatcgagctgaagggattggataagcgaaatagctagatcaatcgttggccagtgagcgcttcaagaattttcaacggggactgctctgggtgtttcataccctttaccggtaataggaaggtctgttccagcatatattggcctcccattgcggcatgtggtgtttgatctgaaaaacaaatccaactgctaccaggcggaaattcgatcgcaacttgttggccattttgctgataatctgcgtcagatttcattttatcgtgtagctgcaacattaaatgatcgtaatggctgcgtcggagtttggtgataccaactttatgctgtaaccaactgctaataggtgagtagcgatcgagttttggcagataacggctcgctaattgctgaaaatcttcacctactcgccaagagcgattttcaccgtggggattaatattggtgaaaatacgaataatccgctcaccgtaattaggcctcgaggggaaagcatcaacgtgtaaacggctatcatctttgcgccaggacgttttgtcccgccatgcggcgactggatgcagccttaggctgttagttgggctgcgtagggcatgggtatattcaggtaataattgtcctaatagactaacgcagtgttgataatagcgctcaagcagctggcgcgttagctcgattttactttcatccgtcacaccagtaagttcaccttccagaggtttgaaactgatgtttttgcgttttatatcgaccagcgctgggttcagtaattgcttctcttgtgagcttaacgggaaagccagattcggtaaaaaaagaacttttccctgttctaaggcttcaattgcatcgggaatgacatgctcattcttgccccaatgttggtgagggagagtgagaatcatcggatctggggcgatagagttagaattcatcagatatccggcctagattattttagtcagtgataaataatataactttttttaaacaattaattgcacttttgtggcgaattgcgagcaaacagaacattccggttagtggcagagcaagtaatggagtggcacttatgcagagtgtcccattaggtgattttggttctgaatattctgaggacaatgatgctcaatgagctgagcatcatggtgctagataaggttgttttagagaggatggcgatagacgacgtatcgtattcctttggctaagaaacgtagaaaaattgaattaatgtagtgaaatattaatatgttaactgaactgtgattggttctaataaatatggacataaaaaagccctgataatctgatcatcaaggctttttttatcaggtacatatcatctgattagacaggcacgattctcgagtcagtaatcgaggagacttgcttttttgagtaggccagatcgtaaacatcgtagaaatcgatttcgcctttattttctatgatgcgtttaattttatttttaaagtcatcattgatatttttattttcaagcaatttagccactgcttctggagacagagcgcggctgaaaaaccattcgccgttatagcaaacgcggaggtcgagtacaccaatgtcttcaaatttaaatatcggctttatttccatcaataaaattgctgacatgatgacaaaaaatgcagtaaaaccaataacgtaataagtaccaaaataaggtgttaaaagcatcagaattaaaacaaagaaatatgaaatcagcattgccaaacacaaatacggatgtttatgaatgaactcaatattaaagtcaagacgaccattccggttttcttttttattgattttctcaatgtcttcaatgagtatttcttttattatatccattgcgatgaccttgtaattgcagatgagtcggataaaattattatctattactatagattagcacgagaaatgcgtcctcaagtatatcagttcgatgaattacctgacctaactgttataggcagtttctgcgtatcgtgagtttttgaacactgttatcacctgctggtgacgacgtaattccctgctttactgagctaaaatttagtagagcgtagaacctgatgagattgaacgctctacttgttttatcaagcacggggtgactatttgaggttagaacgtgagtacaattttaccaatatgagtgctcgcttccattaactcatgtgcggcggtggcctccttgatagggaaggtcgcaaaaacctgtggttttagcttccctttctctatcaatggccaaatttttagttgtaactcttctgcaatgattgctttttctgccacggttcgtgaacgtagcgtcgagccggtatgtgtcaggcgttttaatagcatcggcatcaagttcagatctttagcaggaccattttgcgtacctatttgtacaattctgccattcatcgcagcggcttcataattgcgtgctacatagtcaccagcgatgagatcgacaatgacgtcggcaccgttgccttcagtggctaattttgtttcagccacaaaatcctgagtacggtagttaatcgctacatcggcgcccattgccaggcaagcttctcgcttatcttccgatccgacggtgacaattattttggctgcgccaaaagctttgcttagcatggttgaggttgtaccaatgcctgaggaaccaccgtgtatcagcacggtttctcctgcttttaagccgccgcgctgaaataaattagcccagacggtgaaaaaggtttcgggtaacgccgccgcctcgatcattgataatccttccggaaccgggagggcgtttgtttcgtgtatcacacaatattcagcataaccgccgcctgcgatcaggccgcaaactttgtcgcccatcttgaatcgggatgttttctgtcctaaggccacaacttcgcctgaaatttctaaacccggaatgtctgatgcgcccggtggtggggcatacaggccgcgacgttgcagaacatcgggccggttaacgccggcagccgcaactttgactaaaatttgcccttcatctggtgtagggatagggcgtttccctgccatcaagacggaaggtgggccaaattgggttatttctatcgcaaccatgcgactatcggaggttattgaagacatatcattcctctttagttatggcgaactcattgagtagccaatggcttctgatttacagaaaaggttaatagtttaataaacccctctgagtgctgaccatattatcctcattgtgagaataatccattcgtagagtgcgagtcagatgtgaaaagtaaggtacgacagaaagtaataaataaaaaaggcgcccaatagggtgggcgcataaaagtgctaaaaatgaataactacaggactaagagatactctggatcattttaattgtatgggtaaacccataggccgttatataggtataaatcctaaaccttgctccataaaaaagccggcttagtttacttaattatttgaactgccagcagacttggtaatgatagttttctgcattcagtaggaaatcatcattgacactgggactccaagaatcgtccccaccaacgcccatgtggtaaccatcgatgtttaaccaagtccctttttcatgtttcagcagatgttgatgtgatgtttccatcaattgttgcaagccgtagcgactaatcccgaaatggaagttacctgttagttgtaaattgccatagcttaaactgcgggtgttacaacgcaggccattctcactagggaacgtatagggagtgtgtagcgattcaagaggcaaagtccattggctgaaagtcgcagatagttggcgatctggataattttcatgtggacccagcccaagccaacttacttgcgattcgataagattcagttggcagcacatgcctatccgggctggagatggtgagcctgaggcccgcgtaacattgacttcaattttcatctgattttgttcattgaaatgatagacccaacggctttttaataaacctccttgaggagcgttatactcataatctgcggttatcaatacgccattagacattgtgctggcatgtattgagatacaacggcgatcaagttgatacattccggcctgtttccagcgctcaacccaggcatttggatcaatccgcgtcgtttcgctgataccaatatcattatctaatggagcgcgaataaactgatcctgaagcggagtaagtaaaagcggtttttcattaattaaccactgttctaataaaccactttgtcgatcgaataaccaacgctgacgattattttcaacaatccaatattgctcattagatgtaagttgaggatgtccaatcacggagatattttgcttcgatgcggtgttcgatgcgtgggttaatgaaggcagaatggtaggtaatttccattggtgccacgctgacttgtggtcttcttcagaccactgggtagcggttggttgtttaatctcaacgtgtagccacaattcaccttgtaactttaggggagctggtaatgatcctaactctagcttttggcttagctctggggcgataacaataggtatatttccatgctgaattatttctccatccagttctagtcgccagtaaaaatgttcattgtcagtatgacggaatagaaattcactggttacttccactatgagtggggtggtgctgacaagcgtaaattgaaagaactgctgcgctcgctgtgcttcataaaggctaggatggggagttctatcagggaaaaccaatccgttcatacaaaattggcggtcgttaggagtatcaccaaaatcgccaccgtaggcccagtaggcttgcccgttttcatcatggcgagtcagactttgatcaacccaatcccaaacgaaccccccttgtaagcgtggatgctgccggaaggcctgccagtaacgatcaaaaccaccaaaactattccccatcgcgtgcgcatattcacaaagaattaatggccggggctcttcgggtagaccaatccatttttttatcgaccacttaggcacggcatcaaaaggttggtcttgatccactctggcatacatcggacagagaatatcggtagcggcagtattggctccgccaccttcatattgaacaggacgggttggatcgttagttttgatccagcgatatagcgcatcgtgagttgcgccatggcctgactcattaccaagggaccagatgataatgcaggtatgattacggtctcgttgtaccatccgagtgacgcgttcactgaatgcattgagccaacgtggatcgtcagacagtcggctcatcggttgcatcccgtgagtttcaatattagcctcatcgaccacataaaggcccagttggtcgcataaacgataccacagcgggtgatttgggtaatgagagcagcgaacggcattgaaattatgccgtttcattaactgaatatcctgacgcatagtagcttcatctatggtctggcctgtcagcggatgatgctcatgacgattgactccccggataagcaagggtttgccgtttagtttgagtagccctttatcaatttcgattttcctaaaacctatgtcataagcttccgcctcaatgatttcttgatccaaagacttgagagcaacaacaacgcgataaagtgtaggttgttctgcgctccataagtggggcgattctaccggtagtaccaattcgacacgttccggatagttacctcgttcatcaattgttttgctccccatgtcctgttcttgctgcccaatcagaacatcatttagccaaagctgagcctttatcaaataattgtcggcaatatgaggttgcaatagaggcaaattgatcgccgccataacggagagctccgcggagcgaaaaccaggtgccagtagtgtcttaatctggatattagacagatggatatctggtttatgcagcaacgtcacgtcgcggaaaatcccgctcatacgccacatgtcctgatcttcaagatagctgccatcactccagcgcaagaccaacacggcaatgcggttacttccggtttgaagatagggactaatatcgaattcagcaggcaggcggctgtcttgcgaatatccaacccagttgccgttacaccacaggtgaaaagccgagtttacaccgtcgaaaatgatgcgggtttgaccggatgctggccagtcgggattgagcatgaattcagttgaataacagcccgtgggatttaagtcaggtacatagggtggattaacaggtatcggatattggacgttagtataaataggtgtatcaaaaccaaataactgccaatttgaaggtacaggtaaaagagttgatttaggtaagtcctgagtaatccaatcctcgggaacggcctcagggcggtcaaaataactgaaatgccaatatccatttagagaatgcagacttgccgaatcggtatcatcacgagcctgagtaacatcacgccagctgcgaaagggagaatgtgcatccagtcgattatattgagtgatacctgggttttcccagtcacgtcgagacagtatatttgccagtgatttctctcgattaccttgccttatctctgcattcattttcagccttctttttccgtttgattatcggggcttgcatttagtcgataggcgacactgaatcgcataaatatagccacacaaatgttatgcgctcacatttcttgttttgcttaccttgaaggggaaggaatcgcttgtaaacgggtaaaaaatgaataagcgagtgagatcgcatttatttttggttatgcaaaaaatcgtaaaattttttccgagaaggttcgtaaaatttatttatggctgatgatatgtgtgccaataacacgtaattttatttcgaactacaaggtacccagacgattcgctatttgtgttccgcaagctcttgtggtgtagtttgtgacatgattggaacgttatttactggggctgttgtttgacgaagcacaagttcagggcttaaaagcagagagtttagctggatgccatggctagttcgcagtaacgcgaccaattgttgcaggcttttctcgcctagctgacgaaaatcttgtctgacggtcgttaaaggggggtgaaaataggcactatcgtcggtgtcgtcgtatccaactatggaaacatcttttggaatgctgagaccttgttcctggagggcgcgtaaaacccccaaagccatctggtcactggcaaccagaatagcggtaaaagaggtgccgctttgtaaaagggattttgcgcaaagatagccactgtgtgcgctccagtctccatagaacactttctgaggctttaggccgctcaaggctaatgtggttaaccagccttgatagcgcagttgggaggaaattgtgtctttagagcctgcgatcagaactattttctgatgccctaacgccaataaatgttcggcaccttgcctggcgccatgaaacgggtcaaaaaccacgctatgagcggttgattgcggatcaacgtccagaaatatgacgggaacattggtgcattgatgggttatttctgcgctttgctgctgagttagtggcgcattgattaatatcccctcaactcgctgagccaggagttcattcacagcgcgctggcaggcctgctcgtcaaaatgatcaatcatggcgatgacgacgctaaaacctaattggcgggcttttatctttattgcagaggcaatctgcgatggcgcatgtaaagataaatcggttgtgactaacccaagtgtacagctgttcttaccagccagctgttgggcaacgcgattgggtacatagtgcagtgctgccattgcctgttctattttagctctggttttgtctgagacattcggagcctgatttaatacgcgagaaacagtctgataggatacacccgcgtaatgtgcgacatcatcgagcgttacggatttggttttcataaacagcttctcagcaacagaacttactgaacataatagcaaaattgtggcataaatttttgaacgcagcagtaaaaggttaaaatcgcctgccagaagccagaagccagaagccagaagccagaagccagaagccagaagccagaagccagaagccagaagccagaagccagaagccagaagccagaagccagaagccagaagccagaagccagaagccagaagccagaagccagaagccagaagccagaagccagaagccagaagccagaagccagaagccagaagccagaagccagaagccagaagccagaagccagaagccagaagccagaagccagaagccagaagccagaagccagaagccagaagccagaagccagaagccagaagccagaagccagaagccagaagccagaagccagaagccaggttttattttgtcggctcactgagctttatagataacacttatttaaaaaatcattcgcaacgaaattggcgtagggctaaaacctgcagagttaatgcaattttatagataagctggtttaactgatggcgttgatagctaaaagcatgggttagggtgaaaagcgtcaagcatcagcatcaagcatctgcgccaatgccggataatcaggcgtagtggtatttaatgaaatggttctggcgacaggttgtggccgggggaagtgaataaaaaatggcttctttgccttaattttaggcatgtgaatcacaatattcggttcctgtaataaaaagagttgctattaaaagcccgtcatgagttaatgcgtctcggcctgtggtacagacctatttatgcacgacatcttgagtaaagtagttcatatttaaagcgttatcgttgatagctcttcactgacgaatttccttcatagtgcctccataagtaacgactgataaccggctataacacgcccatggtggcaaaaattttttaattaaggaaataaacatgtctaacatgatgaaaggtcaagtaaagtggttcaacgagtctaaaggcttcggtttcatcactccagctgacggcagcaaagacgtgttcgtacacttctctgcaatccaagatcaaggcttcaagaccctggctgaaggccagaacgtacagttctctatcgagaacggtgctaaaggtccgtctgcagcaaacgtaactgcaatctaatcggcctctcgctgattaattgaaaaaacccgctcaggcgggttttttgttatctgtaataggccatgactcaagttttacgttccgtttgcaacatcccgttcttcctccagacaatctatcctcgaaagctacctatcagcgcttccttatttaaaatactacctatcggtaattaccgttgcataccactctggtacgcgtaaaccttatcattctcactgtattatgtactacactagctgcattgattaaggataggataagactatgaaagttaacgatctagtgacagttaaaaccgacggcggcccgagacgggaaggcgtggttcttgaggttgaggaattcagtgagggcgtaatgtatctggtttcactgaaggattatcctgagggagtttggttcttcaacgaaattgatagcaaagacgggactttcgtggaaccgcgttgaattgattaagcctatatacaagaaaccggagtaggggattccctgtctccggtttttttacatcaatgttagcctgctaccggctaacacattgaatatccgatatatagagagttaatcggcatgagtaactcgcttaaaatgtttcccagttttccgtatccagttctggttttttagcattaaaattattgcttgtcttggcgttacttgcgggttgtccacccgtgtttttacctttgctatttaattggaaaacagccactgcgtgagtcagcattgatgcctgctgctctagtgatgccgccgccgctgacgcttcctgcactaaagaggcattttgctgcgtgacattatccatttcagaaactgcctgagctacctgactaatgccccgactttgttcatcggatgcagaggcaatttcacccataatatccgtaacatgagtgaccgcagttacaatctctttcatcgctttgcctgcgtcagaaaccaaaatcgaaccgtcgccgaccagatcaacggaagcttcaatcagacattctatttctttggccgcgtccgcactacgttgagccaagtgacgaacttcactagcgacaaccgcaaatccacgtccctgctctcctgctcgggcggcttcgacagccgcgtttagcgccagaatattggtctggaatgctatgctattgataacattggtaatatctgcgattttcattgagctaagggatattttatccatcgtgctcacgacatcgctgacaatatcaccgccttcacgagctttgctggaggcattggctgccagttggctggcatgatgagcgttttcagagttttgttttaccgtggcggttagctgttccatgctggcggcagtttgttccaaagatgcggcctgttgctctgttcgtgctgataggtcggtatttccagacgctatttcactggtcccttgatagatagaatctgcgctatttctgacagattcaacggttcgggataatgattcctgcatcagctgaatgttgctgccgagtaggccaatttcatttttgccgaatggaatagtcggttgagtcaggtcgccatcggcaatccgttggatgcgggtgaccagcacattcatgggcttgatgataactttactaatgactaaaaaagtcaccaaagtaagaaccacggtgaaaatgaaggctccgcccatcaagatataacctaaccgagccccttgtttagccgattgatttatctgattggcttgctcggcaagataattaatgctggcgagcaaaggttcgttataggccatatctaactgtttaagcttttccgcttcgagagaaataacttcctcaaagtgcccctgttgtgaggcatccaacatcggcatcatcccttcgctgcgatattgttcgtaagctttcttaagcggtatatccagagctaactcatttttatctttacctgggcgattgaagtaaagatcaaacatcttttgcgattcagccagacgattctccgccgtttttaaaccggattgataactttccgtgtcgccaatgcgtgcggcagaagcggcctgaatcaaaattaagcgtgccgctcggagataatctgagctgttggataaacctagacgaatgtccacctctttagtagcgtgctcaagatactgattactttgttttaagaagtagctagatgtgccaatggccacggcaaacagtgccagtatgccagccagaattgccacaaacagagtaaccaggcggatattattaataaatatgacttttgcctgcgaaggcgtggctgtatctattaattgctgtgtacttccacttttcattattatttccgtcttaaaggcgatcgaagggagaggtaggaaccggacagaactttattcacattggtaattaactacataaactgcatagagtacttttaaaacctatcggccattgacccgaaatgcttagggttatatatgcgacagagatcgcaaaactgattaaatacgttcataaaactaaagaatggagcctataaggccgataaagctgcaaatttaccaagggatttatcagaaaaactggattggcttaatacagtatcgcggtaacttgctgtttttcatcttccttgccttcctcacgctctggttgaatggcccgagcgaagtacgatagctaatgcaatagcgctcctacgaatgaaagaactgctggtggctgtgaacttatgcttgagtaagggaacatcagctctaaaatgctgacaacccgacaacccgacaacccgacaacccgacaacccgacaacccgacaacccgacaacccgacaacccgacaacctgacaacctgacaacctgacaacctgacaacctgacaacccgacagattgaattctttatacagattgagttacagggagcggtagggataaacacgattatctttgcgaaggataagatacgcgaagcgatgcaatgtctcatacagggcttgggcttttgttaatctttctgagttagccgtcactgaaacgagtaaattcgtgataggggagctaaaaatgttttggttccctgcgcgggagagcaaaaatcaggtgcgctgtggcattacggaaactcataagccggcttaattgaacgccagaagattattttttccttgagcaataaattcaatgataagaatattttccttttttaagcgaaatacacttaattatcaacgtaaacgaagtttttaattatatttcctaatgaattattgtcgtttatgatttgttgaaaaaacctcgctttacatatttattccccgaacctataattatgcgaaatttcagtggagagaattaatggacacccaaagttgtagtcaaataagcaaggcaagctgactcatctccttctgatttgttgcttgccgaacatggcgggcagcaccctcaagttttattctgaactgtgcataccctagtgaattataaatagtcgatggttttatcatcgaaagagtttatttggattttattatggtattcaacggtcactctctatttcctcctggttttcacatcagttaattgctgagtattctctcggcacaattacctgtgtgctaaatagcacatgattactcttccattaataatgtggatagaatcatgtcattgactccgttcgtcttaaatatattactcgctacggctttgggcgcattaattggcgctgagcgtcaatggcgtcagcgtatggcgggattacgcacttatgctttggttgctacaggcgctgcgatatttgttcttagctctgccgtaacatctccggatagtccggggcgaattgccgcacaaattgtttctgggatcggttttttgggcgccggtgttattatgcgcgacggcatgaatattcgcggtttgaacacggcggcgactctgtggtgttccgctgcggtgggcgttctttgcggacttgggcttgtctggcatgcggtgtgtgcgactgcgattattttgagcgctaatatattactgcgcgaagctgctcatcgaattaatctacagccccaacaacaggctctcgatctggaagttcgttatcgtattcaggtaacctgcggcactgaagatgaaatattggtgagaacattaatattgcagggattgaatggaatggcactgcgtttgcaatctttatgtagcgcagatatttctcgtcccggtcaattagaagtgtgtgccgaaataatggcaacgccagcggcgcaaaaagaaatagaaggcattgtttgtcgcgttagtctggaaagaagcgtcagcgcggttcattggcgagtggcatcagaattgcccatatgaaattttactgttatctggcaaaactattaatcataaataataaactattctcacccaagtggtagtaaggagccgttatggacgagcaccccggagttaaattaatcaagcgttgttaatttcgatttaaattaatctggttggcaacgcaataaataaatctcgacgtcagtttattctcaaaataattgggaggataaaccctgcgtgatgagtatgaaataaaaagagatgcgttatgaccaaattaatgaaaacagggcaagcggaaaattatcgccgtgaaaaaaacaaaccttttgtcgttgcacaagaggccaaaaatagtctggatttaaccttatccaaattgaatgccaatttaaatggtttaaccgaagaggatgcccaggaacgccttgagcaatatggcgcaaatgaagttgctcatgataaagccccacatgcgttgatacaactggtcgctgcttttaataatccgtttatttttgtcctaatggtactggcggcgatcagtttcttcactgattactggctgccgatgaaacaaggggaagaaaccgatcttaccggcgtatttattattgtgattatggtactgctgagcggatttttgcgattctggcaagaataccgtaccaataaagcggcagaagccttgaaatcgatggtaagaactaccgcaacggtaatgcgtcgtgaaaaacacagcgtgcagccggttaaaagggaagtgtcgattaaagaattggttccgggggatattatttatttgtctgctggagatatggttcctgctgatctcagattggtttcttcaagggatctgtttatcagtcaggcaattttgactggtgaagcaattcctatcgaaaaatacgatgcattaagctgtgtaagccaaaaatcaacctcctcggaggcctgtagtgaaagtgagctgctggaattatctaacgtttgtttgatgggaaccaacgtggcgagtggaacggcgaccgcggtggtcgtggctaccggagggcatacctattttggttcgctggcgaaatctatcgtaggaacgcgttctcaaaccgcatttgaccgtggcgtcaacagtgttagctggttattgatccgatttatgctggttatggttccgattgttttactgattaatggttttaccaaaggtgattggacggaagcggcattatttgccttagcggttgccgtgggcttaacgccagaaatgttgccaatgattgtcagctctaacctggcaaaaggcgcaatcgccatggccaaaagaaaagtggttgttaagcgactaaatgctatacaaaatttcggcgcgatggatgtgttgtgcaccgataaaaccggcacattgactcaggatcgtatcattctggaacatcatttagatgcgaaaggctgtaacgatactcgggtcctgcaactggcctggctcaatagctatcatcaaagcggtatgcggaatctgatggatcaggcggttatcagttttggccgcggtaaatcagttatcgatcctttgcgtagttacaataaagtcgatgaattacctttcgattttgtgcgtcgccgcttgtcgattgtggtgaaagataaggatcagcggcagcagttgatctgcaaaggtgcggtggaagaaatgctccaaatctgtagccatattcgcgatggcgatcagattttgccgatgaatgatgcgcgtcggcaggcattgctgacactagccagccaatataatcaggacggtttccgggttctgctgctagcaactcgggatatgggatcgcaggtcagcaatgttccactcagtattcacgatgaaaaagagctgattgtcgaaggggtgttgacgttcctcgatccgccaaaggaaagtgcggcggcggccattgctgcactgcgtgaaaatggcgtagcggtaaaagttttaaccggcgataacccgattatcaccagcaaaatttgtcgcgatgttggtttggaaccgggagaaccactcggtggcagcgatattgaattgatggatgctgaaacgctggcgcgtgaagtcgagttgcgcacggtattcaccaaactaacaccattacaaaaatctcgcgtattgaaaatgttgcaggccaacgggcatacggtcggtttcctcggcgatggtatcaatgatgctccggcgttgcgcgatgcagacgtgggaatttccgttgataccgcaaccgatatagcgaaagaatccgcggatatcattttgctggaaaaaaatctgatggtgctggaggagggcgtaatcaaagggcgagaaacctttggtaatatcatcaaatacctaaacatgaccgccagttccaacttcggcaatgtgttttccgtattggttgccagtgcttttattccttttttgccgatgttggcgattcatttactgctgcaaaatctgatgtacgatatttcccagctatcattgccttgggataaaatggataaagaatttttgcgcaaaccgcgtaagtgggatgcgaaaaacattggccgctttatgctatggattggcccaacctcgtctatttttgatattactacttacgcattaatgtggtttgtcttcgcggctaatagcgtagagcatcaggcgctattccagtctggctggtttattgaggggctactctcgcaaacattggttgtgcatatgttgcgcacgcaaaaaattccgtttatccaaagtactgctgcgttgccggttttattgatgaccggattggttatggcgattggtatttatattccgttctcacctcttggcgcgctggtcggtctgcagccgctgccgtggcaatatttcccgtggttagcgggtacattgattagttattgcgtggttgcgcaattgatgaagcgattctatatccgtcgctttggggagtggctgtaaattaaagattctgattaaacggcgtcgtacaattattcaccggggtcttctgaccccggttttattgtttattcgttgctcacgcgaataaccaacttaccaaagttcttaccttgtagcagacccataaaggcctgtggggcattctccaatccatcaactaaatcttcgcggaatttgatcttgccctgttcgagccattcgttcatctgtttgatgaattcgccgtagtgatgaccatagtcatcaaaaatgatgaacccctgcattctgatgcgtttacgtaaaatcagaccttgcaataacggcaggcgatctggcccgtcaggtaatgcggtggcgttatactgtgaaataatgccgcaaacaggaatacgtgcttgggtgtttagcagaggtaagaccgcatcgaatacggcaccgccgacgttttcgtagtaaatatctataccgtcagagcaggctttagctaattgctgaggaaaatcagtagattgatgatcaatgcagacgtcaaatcccagttcttctaccacatagcgacatttttctgtgccaccggcaatgccaactacacggcagcctttaattttcccaatttgtccaacaaccgaacctaccgcgccgctggcagccgccaccaccagtgtttcgccttcttttggctgacctatatccagtaatcccatataggcggtaaatccaggcatgcccaaaacaccaagtgagcgagaaggatgagacagtaatgggccaaggtttttcacattgctgccgtcagaaaccgcgtaatcctgccatccgttagcggacaatacccaatcaccgactttaaaatcaggatgttgcgaggcttcaacccgggaaaccgtgccgccaaccatcacgtcgtcaatggcaactggaggggcatatgatggggcatcgctcatgcgaccacgcatataaggatcgagagataaatagcgggttctcagcaagatctgtcctgccgctggctgagggatgtctatgatctctaaacgaaaattatccgctgtcggtgcgcctttgggtctggaggccagcacaatacgacggttatggattttatcttgaggcatgttgagttccttgctcgtttgacagatcggaatgaggtgtggctagcgcaaacctcgttaggtgctgcaaaaagaataatgggtattgcacaaaatgcctcaataaggcacagccgttatagcgggacgatcaggacatcaacgcggctggcattgattaatcgggttgctgagcaataaattttattcatcatgctggcgctatgatggccgcaaataaccaaatctatttgccgtttattactgacgtaattcaggctatccgctaattcgccgtggagaatggccatttcagcaatgggataattggttttggcctgtaactcagccataaataagcgagcttcttcctgtaacaggttgcgcagatcgcccagcattggcgctgcaaagttattatacatttccggttcggtagtcagcgtgaccaaagaaataataccgttatgtgggcgaacgattgaaaccgccttgtcgactaattgctggctgtccggcgaaagtgaaacagcaaccagtacattttgatatttcattattctctccactaaacaacatcatagctaaagagtaggggataggccggcttgaggatgagatctgcttcacagttaatctttttgttaaattcatagcataaaatagcgccaatcgtatgcaaaatgaccttataaacggtttttatgtgtaaattttacccaaaacgagattatacctttgcaaaaagtatgggtatgtaccacatttaataaattctctccaagcgcagtagacaatgacgctatctgaaatgttttgttacgtctgttgtggctttccagacctcttttggacatttttaaccgattattcctagctggttattattcgaacacttattaagtggctgctaatggtttttaatcgtcgcgattactcgggaaaaaatatagtttacttaagttatttatagttttgacgatcatttaatttacttaatagcgattaattctgggattcccgcctcatggcagatttatgctccgttattttggtttggtgatgtttttgttcgaattgatctaaaaaagctaagaattaggcttatatgattggattttaagacggtttctgacttgggcttgttttttaaccgtcaaattgatcaaaaaataagctagctacaccatatttcagaaaattatattttatttttgtgacttgtgtcacattacatttaaaataaatcactactcacgttgtatgtgccgacgattcgggagtagagttggccctctttaggaatattcctaatatttgtaagaaaagtttcatgaacatgacgcaataatagaacggtcgaaaaatactgtagcccaagcgtctgacatgaggctacgtaacaaaatggtttttttctgtgataccagtagtcttttaattacttttagttctatacgttttaataaacggtataacgggaaggatccctggtcatgggtgataaacaccttcacccaacttatgttttaaaacataatctgtcgggatgtataagatgagtacgtctgaattactcaaacatatttatgatattaatttgtcatatttacttttagcacagcgtttaattaatgatgagaaagcatctgccatgtttcgtttaggtatcacggatactatggccgacgcattatctcaattaacgttgcctcaaatggttaaattggcggaaaccaatcaattagtttgccatttccgctttaacgatcacaacactattcatcatctgacgaaagaatctcgcgtggatgatttgcagcaaatccatactgggattttattgtcaagccacttactgcatgagttatcgttgaaagacggtagtgcgtctaaaaaaagagcatgacgatggttgagaaaagtattgttcaggaagccaaagatattcatctcgcaatggagctgattaccttaggtgcgcgtttgcaaatgctagaaagtgaaactcagctcagtcgtggccgtctgattaaactttacaaagagctacgaggcagtccgccgccgaagggaatgttgccattctcgacggattggttcatgacgtgggaacaaaatattcattcatcgatgttttataatgcctacagtttcttactgaaaagtgggcaatgcaccggcgttgaagcggttattaaagcttatcggctctatttggaacaatgcccggatcgggtggaagagccgccgttactggctttgacccgtgcctggactttagtgagattcgttgatagcggtatgttgcagctatctggctgtagctgctgtggggggacttttatcacccacgcccatcaaccgcgtaacagttttgtctgtagtctttgccagcctccttcccgcgcagtaaaaaaacgtaaactttctccgcaacctgccgatataactacacaactgctggatgagcaggttagacgcgcagtttaagtgagatttgattgttagatttttgtcaggcaggcccggtatggatactcggtttgcctgatactagcgactttcgatggatcttaaactccgcaaaacacctcaccttccacccacacactttgctaaggatgtcacgtgttagttattttgggttatatcgtggtactaggtgcggtactcggtggctacatgatggtagggggccaccttggtgcgctctatcagccgtcggaatttttaattatcgctggtgccggtattggggcatttattgttggtaacaacggtaaagcgataaaagccacattgcgcgcaatgccgaagctattgcgcagatctaaatataacaaagtgctatatatggatttaatggcattgttgtatcggttattagctaaatcgcgtcagcaggggatgttgtcactcgaaaatgatattgaagatccccagcaaagtgaaattttctctaattatccccgtattctcgccgataaaatattagtcgagtttattaccgactatttgcgtttaatagtcagcggaaatatgaatgccttcgaaattgaagcgctgatggaagaagaaatagagaccttcgaacaggaaagcgaagtccccgccggtagcttggccatggcgggcgattcattacccgctttcggtattgtggccgcggtgatgggggttgttcatgccctggcttctgcggatagacctgcggctgaactgggcgcgttaattgctcatgcaatggttggtactttcctcggtattttattggcttacggctttgtttctccgctggcaaccctattgcgtcagcaaagtgctgaaacgaccaaaatgatgcagtgcatcaaggtgacgctgctttccagtctgaacggctatgcgccgcaaatcgccgtagagtttggccgcaaaaccctttacaccaccgagcgcccgtcatttatcgagctagaagaacatgtgcgtagagtgaaagctcctgcacctcaagcgacagaagaggacgcatgaagcatcagaatcaccccgttattctggttaagaggcgtaaaggcaaacatgggggaggccatcacggcggctcatggaagattgcttatgctgactttatgacagcgatgatggctttctttttggtgatgtggttactgtcgatttccagcccccaagagctgacgcagattgcagaatatttccgtacgccgttgaaggtggctttaaccagcggtgataaaagcagctccagcactagcccgatacctggcggtggtgacgatcccacccaacaacagggcgaagtgaggaaagtaagcaaatcggccgaagcccggcaggaagaaaatcggttgaataaactgcgcgagaagctggacgaactgattgagtccgatcctcgcctgaaagcgctacgtccacacctactgattaacatgatggatgaagggttacgcattcaaattattgatagtcaaaatcggcctatgttccagatgggcagcgcgcaggttgagccgtacatgcgcgatattctgcgggcgattgcgccaattttgaatgatattccgaataaaatcagtctgtcaggccataccgatgatttgccttatgccaacggtgaacgaggttacagtaactgggagctctctgccgatcgtgctaatgcttcacgacgcgaattgctgaccggcgggttgtcggaagggaaggtgctgcgggtggtgggcatggcgtctacaatggggttaaaggagcagagagccaccgatccagtgaaccgacgcatcagtattttggtgttgaacaaacagacgcagcaaagcattgaacacgaaaatctggataacaaagcgctggatattgagaaagctgaaggtttgaaacagctcgaatccagtgcacaacctgtcgcaggaacggagtccactgcaacggttgcaccgcaggccgcaccggccgtcgagccagctgtatctgcggtaacaacacaatctgcgccggttgctgagtcgccggtagtggggaattcagtggcagcacctgacgcaccggtagcgacaccgccggtcggcgcggatgtcactccgccgccggcagcagagccaccacaaccgaatacggagacggctacctcagtcgccactgggccaacaacatcgttgccagctgcacctgaatctcaagtacctgtctctccgacaagccgcgacgcacagtagaggtgacaacgtgagcatggatattaccgcgttttatcaaacattctttgatgaagcagacgaactgctggcagacatggaacagcacctgttattgctggacccattagcgcctgataatgaacagctcaatgcgatttttcgtgcagcgcattcaatcaagggcggggccgcaaccttcggctttaccgtgttacaagaaacaacccatctgctggaaaacttgttggatggtgccagacgcaatgaaatgcgcctgagcactgacatcatcaacctgtttttggaaacaaaagacatcatgcaagaacagttggacgcctataaaacctcccaagaacccaatcgggatagctttgaatatatctgtcaggcattgcgccaactggcacttgaagcattagaaccgacggctgcggctaacgcacctgcggcggctaacgaggctaaaaccacagcgaccccggctctggttcagggaggaatgcgtatttgcctgtctggcctgaagccacaggaaatcccgctgatgctggaagaactgggcaatctgggggaagtgaaagaccctcatcagggtgaaaacagcctggaagcgacgctgataacttcagtgagtgaagacgatatttgtgccgtgctgtgcttcgttttggaaccggaacaaatcagttttgtagaagcaccggcagtagcggacgttgttataccagcgacaaatgcacctgcggcaagtgcgccagcagtggaagcggcgcctgttacagccgctgcaccggtagcggaagcggtgaaaccggctccggctaccggcgctgagccagcgaaaccgcggccaaaagccagcgaatcaaccagtattcgcgtagcggttgagaaggttgaccaattgatcaatctggtgggtgaattagtgatcacccaatccatgttggcccagcgttccagcactctggatccggtagctcatggcgatctgcttaacagcatggggcagttggagcgtaacgctcgggatctgcaagagtcggtaatgtcgattcgtatgatgccgatggaatatgtattcagccgcttcccgcgtttagttcgcgatctggccagcaagctgaataagcaagtagaactgacgttattgggcagttctaccgagctggacaagagcctgatcgaacgcattatcgatccgttaacgcatttggtgcgtaacagtctggatcacggcgttgaaaatcctgaaacccgtattgcagcaggtaaatccccggtcggcaatctgacgctgtcggcggagcatcagggcggcaatatctgtattgaggtgatcgatgacggcgccggtctgaatcgtcaaaaaattctggctaaagcgatgtctcaaggcatggcggtgaatgaacacatgagcgatgaagacgtcggcatgttgatttttgcaccgggcttttccaccgctgagcaggtaacggatgtttccggccgcggcgtgggcatggacgtagtgaaacgaaatattcaggaaatgggcggccatgtgcaagtcagtttccaggcagggaagggcacgtctattcgcatcctgctgccgctaacgctggcgattctggacggtatgtcggtcaaagtgaatgatgaagtgttcattctgccattgaatgcggttatggaatctctgcaacctcaggcggaggatttacatccgttggctggcggcgagcgcgtattacaggtacgcggtgagtatcttcctttggttgagctataccgggtgtttgacgttcctaatgctaaaaccgaagccactcagggcattgtggtgattctgcaaagtgcaggccgtcgttatgcgctgttggtcgatcagttgattggtcagcatcaggtggtagtgaaaaacctggaaagtaactatcgcaaagtgccgggtatttctgccgcaaccattctgggggacggcagcgttgctctgatcgtggatgtttctgctctacaggcgttaaaccgggaaaagcgtgtatccgttgaggatgccgcgtagccagtccgaatatggacacaggatgccgactaaggttggcagtcctgaatataagcataacaatctattcacgccgtgcggttagttgagtttaatcgcgctggccgggctaaacggcttcgtggaatagattataaattcaacctattgattgaagggtagaaacatggcaggactagcaaccgtcactaaattggctggcgaaacggtaggacaagaattcctgatttttacgctgggtgatgaagagtacggcattgatattctgaaagtgcaggaaattcgcggttacgatcaggtcacgcgcattgcaaacaccccggcgtttattaaaggcgtcaccaacctgcgcggcgtcattgtgccgattatcgatctgcgcgtgaagttcgcgcagaacaacgtgtcttacaacgaaaataccgtggtgatcgtcttgaatttcgatcagcgcgtggtgggtatcgtggttgacggcgtgtccgacgtgctgtcattaactaacgagcaaatccgcccggcacctgagtttgccgtgactctggcaactgaatacctgacgggccttggctctctcggggaaagaatgctgattttggtggatatcgaaaagttgttgagtagcgaagaaatgtcgttaatcgacagcgttgcgaaaggttaagtagataccagcgggggaaaccccgcttttttacaggtgaataccgtgtctgccgctcaatagctcccttcaggtgccgcaaaataatagttgtgccctcaggtaaagttccccctgccgctgccgataacacatgtaattgacgtacttttgatttgacgtacttatgaagggataacatgttcaagcgtatgaaagtagtcaccagtttattgctggtgttggtgttatttggtgccttacagcttatttctggcgggcttttctttaatgccctcaaaaacgataaagaaaactttgccgttttgcaggttattcgtcagcaacaatcttcactgagcgatagctgggtcaatctggttcaaacccgaaataccctgaaccgcgcggggattcgctatatggcggatgcgaacggtaccggtagcggtacgccgttgcctgagttgttgaccttggcgaaagacacgctggttaaagcgcaaaaaagttacgctgatttcgaacagattccagtggatagccgacagagcgctgaaagtacccaacgcatgaaacagacttacgatgcatacgtaggcgcgttggccgaactgatccagttaatggaagccggcaaaatcaaagagttcttcgatcagccgaccaccagtttccaggacgcctttgaaaaagattacaccgcttaccgtatgctaaacgacaacctgtatgcctcagcggtagaagacagtaataagtcattcaccgttgctatgggtatcctgattgcgattctgatcgcggtagtagcagtgatgctgatcgtttggttcggtatccaacacattctgattaatccgttaaatcgtttgattgaacacatcaaacacatcgctggcggtgatctgactcagccgatcgaagtgctgggtcgtaacgaaatgggcgcgttggcagccagtttgaaaaacatgcagtcagagctgatcaacaccgtgagcggcgtgcgtatgggtgccgatgctatttatagtggcgcatctgaaatcgctgcgggtaacaacgatttgtctgctcgtactgaacagcaggccgcttctctggaagaaaccgccgccagcatggaacagctgaccgcaacagtgaaacagaatgccgaaaacgctcgtcaggcaagccaattggctctgagcgcctctgaaaccgcgcaaaaaggcggcaaagtggtggctaacgtggtgcaaaccatgcatgacattgccggtagttcacagaagatcgccgatattaccagcgtaattgatggtattgctttccagaccaacattctggcgttgaacgccgcggtagaagccgcgcgcgccggtgagcaaggtcgaggcttcgcggtggtagcgggtgaagttcgtaacctggcgcagcgtagtgcacaggcggcaaaagaaattaaaggtctgatcgaagactcggttaaccgggtagacatgggctccgtgctggtagaaagcgccggggaaaccatgggtgacattgtgaatgcagtgacccgcgtcactgacatcatgggcgaaatcgcttccgcctctgatgaacaaagtcgcggtattgatcaggttggtcaggcggtgacagaaatggaccgcgtaacgcaacaaaacgcctcgttggttgaagaatctgcttccgccgctgcggctttggaagagcaggccagcctgctgacccaatcgatgtctgttttcatcctgcgggtggataacggtaatagtaataaagatgtgagaagaaccaagcagccggtagtggaacagaccggtactgctaaaaaaacactgggaagtgacctgcaagagaattgggaaactttctagaccctacaaaatataatattaaaagccggccttagagccggctgagaagaggttacgatgtttggccgaatccggatttctaccagctttttcctgttactgatgatgatttgctctatacagttgatatcaagtggtctgtcgtttactgcttttcgtgcagacaaccaaaatctcaaccgagtggatctgagtagccagcaacgggatgcattaagcctgagttgggtatccttgcttcaggctcgtaataccttaaaccgcgcggctacccgggcggctctcaacgtaccacaggaaaaggtcaacgaattaatgggcaatgcccgcagttcgttacagaaagcagatctctactttaaccaattcctggctgtaccccgtgttgatgccagcgccgttgaattaaccgacgcgacacaagccagctatcagaatttacgcgcggcgctgcgggaattgatcgtgttcctcgaagccggcaagttacaagagtttatggatcaaccgacccagaaaactcaggatctgtttgaagctgattttgtgcaatacctacagcatacctctgaaattattgccgaatctggccatgaaaatgggcaggcttatttgctttccaaatggatttttgctggtgcaattgtgctggtgatttctatggcgatttcttgcctgatctggctgcgtaccatgtttgtgacgccgctggcgattatgcgtgagcattttgaccggattgctcaaggcgatttagcgggcaatatttcggttaccgggcgtaatgaaatcagtcaattattcggcagtttgcgcattatgcagcagtcgctgattagcactgtgagtaaagtccgagacggcaccgaatcaatgttgaccggtattcaggagatttccgcaggtaataacgatctttccgcccgtacggaacagcaggcggcttcgctggaagaaaccgcggccagcatggagcaattaaccgcaacggtaaaacagaatgcggataacgcccgtcaggcaacgctattagccaaggatgcttcggcaaccgccgctaaaggtggcgctctggccagcgacgtggttagcactatgcacgaaatcgctgcgagttctcataaaatcggtgcaattaccagcgtaatcgacggcattgctttccagaccaatattctggcgctgaacgctgcggtagaagcggctcgtgccggtgaacaaggtcgcgggtttgccgttgtcgccggtgaagtgcggaatctggctcagcgcagtgcgcaggccgcaaaagaaattaaaggactgatcgacgaatccgttggtcgcgtgcgtcagggctctactttggtagaaaactcaggcaccaccatggaagaaattgtccgctctgtaacaagagttaccgacattatgggggaaattgcctcggcttcggatgagcaaagccgcgggatcgagcaggtttcgctggcggtcacccaaatggatcaggtaacacagcaaaacgccgcattagtggaagaggcagcttctgcagccaacgcattggaagagcaagcaggttatctctcccatgcggtgtcagtcttccgtttggcgcaagatggctacgatggggattggcaggaggctacaggtgcagataagcaacctgttgttaaggaaatctcagattgttaaacggcgtagcatgtcattttttaagggtgaggccggatgaaaccatctcctaagtcaacccccccagattctgggtcgatattaaaccagatggtacaacggttaccgctgtcggatgtgcatttccgacgtatctgccagctgatttatcagcgggcaggtatcgtactggccgatcataagcgggaaatggtttacaaccgcctggtgagacgcctgcggttgctgaatattaatgattttggtcaatacctggcgttgctggaaaccgatccgaatagcgcagaatggcaagcgtttgttaatgctttaaccactaacctgacggcttttttccgcgaagcccatcattttccgattttggctgaacatgctcgccagcgaccagggaattattcggtctggagtaccgcggcctcgacgggagaagaaccttattctatcgcgatgacgttgagcgataccttagggcatcgtgccggtagctgtcaggttttggccagtgatattgatactcaggtattggaaaaggccaccagtggcgtttatcgacaggatgaattgcgctcgctttctgctcaacagatgcagcgctattttttacgcggaaccggccctcatcaaggcttggttcgggtacgaccggaactgtctaatatgctgacttttcagcagcttaatctgttagcgccagaatgggcgctgccgggacagttcgacgcgatattctgtcgtaatgttatgatttattttgataaagagacgcaggaacgcatcttgcgccgctttgttcctttgctaaaacccggcggcctgatgtttgctggccactcggagaatttcagtcaaatcagtcgggaattctatttgcgcgggcagaccgtttatggactgaccaaggagaggtgatgagtaaaatcagagtattgtgcgttgatgattcagcattaatgcgccagttaatgaccgagattattaatagtcacccggatatggaaatggtcgctacggcgccagatccgctggttgcccgtgatttgatcaagaaatttaatccgcaagtactgacacttgacgttgaaatgccgcgcatggatggcctggattttcttgaaaaactgatgcgactgcgacctatgccggtagtgatggtttcgtcattaactggtaagaattccgaaattactatgcgagcgctggagcttggggcgattgatttcgtcactaaacctcaattgggtatccgcgaaggcatgctggcttatagcgagctgattgcagaaaaaatccgcaccgcggcgaaagcccgtttgccacgacgcattacggataatgcgccggtcatgctgagtcatgctccgctgctgagtagtgaaaaactgattgccattggcgcatccaccggaggaaccgaggcgattcgtaccgtattgcagcctttgccgccgaccagtccggcgttgctgattactcagcatatgccaccgggatttacccgttcttttgccgaacgtttgaacaagctttgtcaaattacggtaaaggaagcggaggacggcgaacgtgtgttaccgggacatgcttacatcgcaccgggggatcgccatctggaactgacccgcagcggcgcgaactatcaggtacgtattcacgatggcccggcggtgaatcgccatcgcccgtcggttgacgtactgtttcgttccgttgcccagtgcgcggggcgtaacgccgtcggcgtgattttaaccggtatgggcaatgacggtgccgccggtttgctggaaatgcatcgggctggcgcatataccattgcccagaacgaagccagttgcgtggtgtttggtatgccacgtgaagccatcggcatgggtggcgtcaatgaagtactggatctgaaccaggtaagccagcgtatgttggcgcagataagcagtggtcaagccttacgtatctagggatcggcttcagattttaatattccggtgtaaatcggcttttgttttcaatagctcagcggtgagcaacaaaccttaggagtaagtatggcggacaaaaatctcagattcttagtggtagacgatttttcgaccatgcgtcgtattgtcagaaacctgctaaaagagctgggctttaacaatgtggacgaagctgaagacggcgtcgacgcattgaacaaattacgcgcaggcggttttgattttgtggtttctgactggaacatgccaaacatggatggcctgcaattgttgcaaaccattcgcgcggacggcgcgctcgcagctttaccggtgctaatggtgaccgcagaagccaaaaaagaaaatattatcgcggctgcgcaagcgggtgccagcggttatgtagtgaagccttttactgcagcgaccttggaagaaaaactcaataagatctttgaaaaattgggcatgtaaggagtcgagatgaataaccatccaatgcccgcaactgatgcggcatcagccagtgatataatcagccggattggtaatctgacacgtatgctacgtgacagcctgcgtgagctggggcttgatcaggcgatagctcaggcggcggaagcgattccagatgcacgcgatcgtctcgactacgtggttcacatgacggcacaggcggcggaacgtgcgctgaactgtgttgaggcggctcaaccacgccaaaacgagctggagtcatcggctaaagcgcttaaagttcgctgggatgaatggtttgccaatccgatcgaattgtctgatgcacgttcactggtcactgatactcgcgaatatctggatttggtaccagaacacacttctttcaccaacgcgcagctgttggagattatgatggcgcaggatttccaggatcttaccggtcaggtgatcaagcgcatgatggatgtggtgcaggaaattgagaaacagttattaatggtgctgatggaaaatattccggaacaaacggcaaaacctcagccagtcaatagtttacttaatggccctcagctggataaaaacggtgcaggggtaattgcaaaccaggatcaggttgatgatttactggatagcctaggtttctaagctgacggtgaacgtttaaatgcagatgaggacatttccctcatctgcaatttactgcttggccatcattttgactggttatccaactgaaaaatggcgcttcactcgttgtcacagatttatagtacgtccctcacttcttcctgcctgcatttggctaacaacactgccttttccgcattgactcgcccgtagccataccatttgctgtgcccatttttatcatatttgccatttttccgatcaatcttatcgcaggagtcgcggatgatatctctgacctcaaggtaggtgagcgatggattgacggacagaatcagggcggccacgccagcggcgccggggcaggaactggaggtgccgccgaacttgttggtgtaattaccaaagagatcgccggttagcgtcataccggtattatacccgtcctgattacgtacatcggtggtccagatgccggaggtgagtggggcggggtggaatttctcaggatgggcgaaatccccgctggggaaggtacaccacagcgctttgccgaagtcactgtaggcgcagcgggtgctgcggtcattacaggcaccaacggctatgactttgtcattactggcgtaaccgttattatcgaccgattcattaccgttgcctgcggcaaagaaaaccgcgcaccctttcccgttacgccctttttctaccgcatagtctatggctagacgcgtaagcgccggtaattcggtttctctatcgtgatattcatcatcaggatcaaaccaaataccgtcggcgggcccccaactgcaagaaatgatatccgcgcctttatccgcagcccacacgaaagcgagagcttcccccatggagcctaagccatcgaccagacgaataggcatcagatttgcctccggtgctacgccggatgcgccatacaaaccatcggcgcaggccacgccggcgcaggcggttccgtgtcggttacttttatccggcaagggattttcattctcataacccatttcatagttatggggatggacgactttacccggccgcataaattcagggtgctgaatatcaaagccatcatcaataatggcaatggtgatacccgcgccgcgtgttatttcgtgggcggcttcaacgttagcgctggcgtcgacatccgtttctgttctcacggtagttttcttcaaatgccattgattggggtgaatcgctttaggcattttttggtgaattaattcaggatgacaatattccacttcttcacaattcagtatgtcctccgcgagagtaaatatatcatcgccggtatcttctatggctgaaataaaataggcgtttttaaggaatgaaatttcattttttataataagattgtatttattaatgatatattcacattgggttttttttatgtcatttttgaatttgataaagatattttctgtataaacgatcggctcagcagtttgttcattcctaaaaccgaaaccggcaaatctgacatcccgatcggtggaaagtttttctctcaattcattgataacgttttcttccccttcaaccctaaccacatagacgtttacattactgatattaaacaataaattgtaatgtaagggttcgtctttaatgattttatccattgtatcggaaaattcttttccagctttcattcttacaataagtaaatcgccggatttaaccaaaggtaaaatttttctatggttatctttaatgtcataagtaacgtcaaatcttttcatttcaaatcctttttgattgaattggtcatcggtttattatgctaacagtgaatgttagttattcttggttaatggttttgatataattaatcactcccaacttctatttatttatatcacctggaacctgtcttttacataaacgcctcgctaatgactatcaggcgtttatgacgggatattcattatcattagctagcctaagcgttatttttgctaaaaataaaatgataaaaccgaatgcagcgttgaattttcaactggcgatatctccctgtggcttaaaaattatgcgtggagcgaggcgaagcccatcgccttatcagagaaataaccgcctaattgctgctttgttccgtccatcaccccagaaaaattttgtcatgctagcggcaattatttttcctttaattttttattcttaacaggaacgcccaagctgaacagggacactgactgtggctgaagatagcgatctggaaaagagcgaggaacccacagcccataagctggagaaggctcgcgaaaaaggccagattcctcgctcgcgcgaactgacctcgatgctgatgctcggggccggtttgtcgatcctgtgggtttttggcgaatccatcgggcggcaactggcggcgatgatcgcgcagggattacagtttgaccacagcgtgattggtgatgaaaagcatatgctgcgacagattggcatgctgctgatgcaaaccgtgacggcgctgttaccggtatttattggattggtattggtcgcgctgtcggttccgatgttattgggcggcatctcatttagcgccgaatcctttaagttcgatttaaaacgtatgaatccgctttccggcttgaagcgcatgttttcttcgcaagtgctggccgaactgctgaaagcgattcttaaagccacgttagtcggttgggtcaccggcatgtttttgtggcactactggcctgacatgctgcggctgatagcggctccgccccttgccgcactgggtgatgccctgcgtttgattttgttctgcggttttatcgtggtgttgggcttaacgcctatggtgagttttgatgtgttttatcaaattatgagtcatatcaaaaagctccgcatgaccaagcaggaaatacgcgacgaattcaaggatcaggaaggggatccgcacgttaaaggacgtattcgccagcagcagcgcgcaatggcccgtcgccgcatgatggccgatgtaccgcaggcggatgtgattgttaccaacccgacgcactatgcggtggccttgcagtataacgagaacaagatgagtgcgccgagagtgttagccaaaggtgcaggagaaatagcgttacgaattcgtgagttaggtgctgaacaccgcatcccgatgttagaggcgccgccgctggctcgtgctctgtatcgtcatagtgagatcggtcagcatatcccggccaccctgtacgcggcggtggcagaggttcttgcctgggtttatcagcttaaacgctggaagctggaaggtgggctgattcctaaaaaacctgaaaatctaccggtgccggatgcactggattttgctggagagagtgagactaatggctaacttggccgccctgcttcgtttaccgggcaattttaaagacacgcagtggcagatacttgccggtccaattctgattttgatgattttgtcgatgatggttttgccattgccgccgttcattctggacctgctgtttaccttcaatattgcgttgtccatcatggtattgctggttgcgatgtttactcagcgcacgctggagtttgccgctttcccaactatcctgctgttttctaccttattacgcttatcccttaacgttgcctcgacccgaatcatcttgatggatggtcataccggtgcggcggcggcggggcgggtggtagaagctttcggccacttcctggtgggcggtaactttgccatcggtatcgtcgtgtttatcattctggtggtgattaactttatggttatcaccaagggtgcaggacgtattgccgaagtaggcgcgcgctttgtactggacggaatgcccggtaagcagatggctatcgatgccgatcttaacgccggtttgattggcgaagaggaagcaaaaaaacgacgttctgaagttacccaggaagccgatttctacggttcaatggacggtgccagtaagttcgttcgcggtgatgccgtagccggtttgctgatcatggtgattaacgtgatcggcggtttgttggttggggtgatgcagcatgatatggccgtgggccacgccgcagaaacctataccttgctaaccatcggtgacggtctggttgcgcagattcctgccttggttatctctactgctgccggtgttatcgtcacccgcgtgagtaccgatcaggacgtgggccagcaaatggtcacccaactgttcaataacccgcgcgtgatggtgctgagcgccagcgttctggggttactgggcatggtgccgggaatgccgaactttgtcttcctgttgttcaccgcggctttactggctttggcctggcgtttaaagggcaaacagaccagtcagcctgcggtggcagaacagcccgtggtgcaggatcagcagcaggctgccgaagcgacttggtcagatgtacaactggaggatccgctgggcatggaagtgggttatcgcctgattcctatggtggatttccagcaaaacggcgaattattggggcgaatccgcagtattcgtaagaaatttgcgcaggaaatgggctatctgccgccggtggtgcatattcgggataatctcgaattgccacctgccagctaccgtattctgatgaaaggggtggagatcggcagcggcgaagcccatccggggcgctggctggctattaaccctggcaatgccgtgggaacattacccggtgaagcgacacaggatccagcctttgggctggctgcggtctggattgagagtgctttgcgtgagcaggcgcagattcagggctttaccgtggttgaggccagcaccgtggtggcgactcacttaaaccatttgatcagtcaatatgctagcgaattattcggtcgtcaggaaacgcagcagttgctggagcgtgtgtcgcaggaaatgcctaagctgacggaagatttcattccgggtgtggtgtctctgacaattttccacaaagtgttgcagaatttgttgtccgagcgggtgtctattcgcgatatgcgaaccattattgaaacgctggcggaacatgcgccgaaccaaaccgatccgtacgagctgacggcggtagtgcgcgtggcgctgggtcgttcgattgcacagcagtggttccctggtaccggagaaattcaggttatcggtctggatgcggcgttggagcgtttgttgttgcaagccttgcaaggtggtggcggtttggaaccgggtctggcggatcgtttgctggatcagtcgaaacaggcattgcagcgtcaggaaatgttgggcgcaccgccggtattgctggttaaccacgcgttgcgtgcgttgctggctcgcttcctgcgtcgcagtctgccgcaaatggtggtgctgtccaatctggagattggcgacaatcgtcaaattcgcatgacatccaccattggagccgcctaatgaagtttcatgctttggttttagccgcgttagcgtcagtgtcgtggggcgcttacagtgcttccggcagttgggttgccgatgatattggtgtgacgcagaatttacgtggcgtgccgacttcatcgccggtattgcgtccgaccacgccttatgtcaccgcggagcatcgcattgtgtcggttagctggcggatacagttgctttccgccgctcccaatggtctgcaaatgaagctttgttccccctctcgttgtattgatttgaacggcggtagcggttccagccggggtctggcgggtgagtctgcaaccagtccgttgacttttgtctatctgattcaagggcaggggcgagtgaatccgccgttacaggtgatgagtaaccaggtgatagtgaattatcaatagaattccctttttaaggtaaacagattcagattgccaatatctttcaattgagccgcttttcagtggctctaaattgaggatatttacccttttctatcagattcaccttagagtaataaaagataaatataaaactggagccgatttttaaagcctcgtcgttcggcttttccctcgctttcttattgtgttttcccatctaagtcagacgaagattaagttcggatctggtttcgaaagcccggtagctcactgtttcctccctcgtgcactcttcgtccggtgagccagcgctagattcagcagcgggcgcatcctgaccctacggctcaaagcgctttaaacaactgccggctgttcactctggttcttatcccggcttggcctacttcccgattgcgccttgttaaaattaaaaccatttttcttatgagtcataatttgtctttcgccgttgatatggcttttgaccttgagcttgacctttcagagcgcatttgagttgtcgaatgaagaatgcaggcaggacgcgaagcatgggcgccgcgcttgaacaggcgcgaatcgcggcgttccgtcaaccgaaatttgatccggcacccaattttcatcaggcttgtgatgttgaccagaagcgttatctgaaaccttcagcaataacaatcaatagatgagtgagagtcagatgggtaagttaccttgcggtagatgtaacgacccggaaggaacacagtacaagaaaaatattaattttatgaagaataataacgtgaaaaaccagaggaaattagaaaggaaaaaattcacctttaacggtgatgcgtgacgaacgccaccaccgtcagataatcagctcaaaaatcaaccgcaggttgaagtttaaacgccgattttacgccccagcaggctagcgccgcgggactgaccatcggggccatacagagactgaccgtggcgcgtattcaataccgccagcgcctcatcattgtgcgcgatgtgctgattcagcaaaaaaccgttgtgcaaattggtataacgcatcttttcggcttttttcaggattcgctcccagcgctctgtcagcgcaggaacttgctgataaggggctttgattttggccgctgtttctgccgccagacggttttgatccagataatccagagtcgctaataacgaacttttttgctcggttatcccttgcagaaccacgccgtgaattcgcccgtcgcacagtaatcgctgctcttcagcaataaccacggacagggtatctaaacattccagctgttgatccagattggtctgtaatctttccaccgccacttatccttacacaattaactatttttaagataatccgcagcgtcttttaacagggcatcggcaattttaccggtgtccatggtcagttggccggagcgaatagcctgtttcaaactttctacacgttctacattaatatcctggctgcccggttgcatcagcttggcttgcgcgtcgctgagtttaacctgcgtgccgctaacttgcgctttagcctgggtagacttacgcatttgctgcgctgcctcgctggtttcgcgcggttgtaccgggctgaccggcaccagtggctgtgtgcgatcgatgctcatggtgttactcccttcatggcgggatttagattagtgacccgcaaactggtggcgggatttacgctaattcacccgcgaataactgcttgttaatggttatcggcaacgatgataaaaactttaatcactataacataatgcgaataacgccatcgtcacccaaggtgccactgacgatttgacccgacgccatacgcacccgaacgttatcctgaagggcggcgttgttcatcgccttgccttcgctattgatattaaagccttctccctgcgcgacaacctgaaccgcctgaccggccttgatcacccatgagcgcctgagcatggccttggtcagcggttgtccggcattaatatggcgtaaactgatcgtacccttagcaaaacgtgcctcgtttaacgcgccttgcggcaaggtgtccaaccgtccttccttataagccatgtctttttctgccagcttctcaccggcagtgatctggcggctggccaccagatatttccccgtgacctgcacctgcgtctgcataaaacgccgttgctgaccacagcgcaccgacaaactgacgttaccccatgggcgcgcgttggccggtagcgagatttcgggattttcacactgcggccattgagcctgtggcgtttttattttcacttcaacctgccgggtatccgaggggaattggctgtgaaagaactggtcaatctgttcggccagatccgttgcctgcgctgttcctacacacagccacgccaagcctaacccgatgacaccgcctgctttcatggaatcccctacgtcttgaggccgatttaatggcccgatagattgactgcttccccactagtgtacctgtagctgaaaagggttaaggggataaatagcgacgcattttgcccttattcaaacgataggctttccctaacgccgtttatgctgtcgactccaaattctaacctcgcgggggggctatgctcgacaaactggacggtgctctgcgctttcaacaagaggcgctaaatcttcgcgctcagcggcaggaaattttgtctgccaatattgccaacgccgatacgccgggctttcaggctcgcgatatcgatttctccagccaactgcaaaaagtgatggagcaagggcgtgttaacggcagcgggatgtcactcagtttgaccgcagcccgtcatattccggctcaaaatattcagccgccggatctggatctgctattccgggttccagaccaaccctcgatggacggcaacacggtagatatggaccgtgaacgtaccaatttcgccgataatagtctgaaatatcaaaccgatctgaccattcttggcagccagatcaaagggatgatgtcagtgttacaacaaggataaggcgtatgtctttactgaatatatttgatatcgccggttctgcgttgtctgcgcaatcccagcggatgaacgtgagcgccagtaacatggccaacgccgacagcgtaaccgggccggatggccagccttatcgcgcaaagcaggtagtgtttcaggttgccaatcaaggcgctcaggaaaccggcggcgttcgtgtcgcacagatcgtagaagacacggctccggatcgtttggtgtatcagccgggtaatccactggcggatgccaaaggctatgtgcgtatgccgaacgtggatgtggtgggtgagatggtgaacaccatttccgcttcccgaagctatcaggccaacgtggaagtgctgaataccactaaatccatgatgctcaaaacgctgactttgggccaataatcggagccgacaatggcaattaatacctcaatgaatgacagcttggacaacactattcccaataccgctgccaagcttcagcaaaaacagactctcggcggtgctggtagcagcgaagagatgcaaaacagctttctgacgctgctggttgcccagttgaaaaaccaggacccaactaatcctctacaaaacaatgaattgaccactcagctggcgcaaatcagtacggtacaaggtattgagaaactgaatacgaccttgggttcgatttcaggtcagattgataacggtcaatcgttacaggctagtgcgctcattggccacggcgtgatggtgccgggcaacagtattctggccggttcgaaggacgacatcgtgagtacgacgccgttcggtatggaactggtgcgcggagccgacaaagtgaccgccactatcagcgataccaacggtaacgtggtcaaaactattgaattccctggtggtttagaggcaggcgttcatgtctttacttgggatggcaagctggaagacggcagcaacgcaccggatggcgcctacagcgtcagtatcgccgccagcagcggtgtggagtcactgaacccaacggcgctgagctttggcgtggtgaacggtgtcaccaagggcgctcagggtaccaagctggatctcggcccgcgtggcaccgtgacgatggatgaagttcgccagattctgtaagtccgctgcttcgtgcacggaaggcattttgataaagcagtgggccagacaagagtttggttctctcatttacccggcgttttgatgttgtatcaacgccttgaatcctaacggagagtaacatgggtttttctcaagcagtcagcggtttaaacgcagcgtctagtaatctggatgtgatcggtaacaacattgccaactcggctacctctggttttaaagcaggttccgtatctttcgccgatatgtttgccggttctcaaaccggtatgggcgtaaaagttgccggtatcactcaggacttcaacgacggtaccccaaccaccactaaccgtcgtttggatctggctatcagccaaagcggtttcttccgtatgcaagacagcagcggcggtattttctacgcgcgtaacggccagttcaaactggatgaaaaccgtaacatcgttaaccagcaaggcttgcacctgaccggctatcctgccacaggtacaccgccaacggttcagcagggtgctcagccgattccgctgacgattccacagggcatgatcagcgcgaaagcgaccacttccggcaacatggtcgctaacctgaattcatctcacaagccaatcaccgaaacttttgatccggctaagcctgatacttatagcttcgtcaacaatatcaccaccttcgatagtctgggtaacagccacgatgtcagcgtgttctttgtgaaaaccaaagacaacacctgggacgtgtacacccaagacaccagcgtggccggttctaaagccgacaagcaaggcaccatgaacttcgataccaacggtctgctcaccggcacgaccgatggggcaggtgctccaagcgcaacgccattcactctgaatgtgccaatgtccgcattgaatggtgcgccagcgcagacgtttacactgaatctggccggtgccaagcagcagaataccggtactgacagcatctcagcccagaaccaaaccggctatgcggcaggtgagtttactggcttccagatcgaaaaagacggttccgtgatcggtacttactctaaccaacagaaacagctgctgggccagatcgtactgactaactttgctaacccagaaggcttgtcttcacagggcgataacgtttggaaagaaactgcggcttccggtaacgcgattctgggtacggcaggcggtggtggtttcggtacgctgaccagcggtgcgttggaatcttccaacgtggatctgagtaaagaactggtaaatatgatcgttgcccagcgcaactaccagtccaacgcccagaccatcaaaacccaggatcagatcttacaaactctggtcaacctgcgctaatcgcgctaacgggatagcagcatggatcacgcaatatataccgcgatgggtgccgcccggcagacgctggagcagcaggccgttaccgcgaacaatctggcaaatgcttcaacgccgggcttccgcgcgcagttatctgcgttgcgagcagtaccgattgacgggccgagcatggcgacgcgtactttggtggcggcatcgacgcccggtgcggatatgagtcaggggccaatgaactacagcggtcgcccgctggacgtggcgctgcagcaagacggttttatggccgtgcagttgccagacggcaccgaaggttatacccgcaacggtaacattcaggtttctgccgacggtcagatgacggtgcagggttatccgctgatgggggataacggcccgattgacgtcccgccgcaggcggaagtcacgatcgcggctgacggcaccatctcggcgttgaacgcgggcgatccgccaaacaccattgctcagattggccggttaaaactggttcaggcgcagggcagtgagctgacgcgcggcgatgacggtttgttccatctgacgccggctacgcaacagcaacgtggtgctacgttgccgaacgatccgctggtcaaagtgatgcctggcgtgattgaaggcagcaacgtcaaaccggtggaaactatggtggatatgatcgccaacgcccgccgttttgaaatgcagatgaaagtcattcacagcgtggatgagaacgaacagcgcgctaaccagctgttagctatgagttaagcgcccaggcgcagaggagtacactgatgatccgctcattatggattgccaaaaccggtttagatgcccagcaaaccaacatggacgttattgccaacaacctggcaaacgttagcaccaatggctttaagcgtcagcgcgccgtgtttgaagatttgctgtatcaaaccatgcgtcagccgggggctcaatcttcggaacagactaccttgccgtccggcctgcaaattggtacgggtgttcgtccggtggccaccgagcgcctacacagccaggggaacctgtccaagactgataacagtaaagatatcgccatcaaagggcaggggttcttccaggtgcaattgcctgacggcaccaatgcctatacccgtgacggttcattccagatggatcagaacggtcaactggtaaccgccggtggttttcaggtgcagcctgccatcacgattcctgccaatgccttgagcatcacggtagggcgtgacggtatcgttagcgtgactcagcaggggcaaaccgccgctcagcaggtcgggcaactgacgttgactacctttatcaacgacaccggtctggaaagcgtaggcgaaaacctgtatcaggaaaccgccagctccggcgcaccgaatgaaagtacgccgggcctgaacggcgcaggcttgctgtatcagggctatgttgaaacctctaacgtcaacgtggcggaagagttggtcaacatgatccagacccagcgcgcctatgaaatcaacagtaaagcggtaacaacttctgatcagatgcttcaaaaactgactcagatctaagatagctttcggggggctggattgccccctgactgcgttaggccgattggaattttggggttcaaggcagcttacccctttggttacaggtaataaaaacagagatggatacttcgccgttcagaaaattaagtggattgagatgggtctgtgcgccaacaatggcggtgctgctgctcaatggctgtgcgtatattccgcataaaccactggtggatggcaccacctctgcgcaacccgcgccagcgagtgcgcccttgccgaatggctcaatatttcaggctgttcagccgatgaactatggctatcagccgctatttgaagaccgtcgcccgcgcaatatcggcgacacgctaaccattaccttgcaggaaaacgtcagcgccagcaaaagctcttctgccaacgccagccgtaacggtgccagcaaatttggcgtagccactgcgccgcgctatctggaaggtttactgggcaacgcccgtgccgatctggatatttccggcgatagcacctttggcggcaaaggtggagccaatgccaataacacctttaacggcactattaccgtgaccgtggatcgggttctggccaacggtaacctgcatgtcgtgggggagaagcagattgcaatcaaccagggaaccgagtttattcgtttctccggggtcgtcaatccgcgcaccatcagcggcagcaacaccgttacctcaactcaggtggcggacgcacgtatcgaatacgtgggtaatggctatatcaatgaagcgcaaaccatgggctggttgcagcggttcttccttaatgtttcgccgttctaagaggccgattaatgcgtaaacaatctctcatcccgctttttgccgcactgttgtcattggtgtggctgccggcatcggcagagcgaattcgtgatttggttaccgttcagggcgtgcgggataacgccctgattggctacgggctggtcgtggggctggatggctccggtgaccagaccatgcagactccctttaccactcaaagcctgagcaacatgttgtcccagttagggattactgtgccgccgggcaccaatatgcagctgaaaaacgtggcggcggtgatggttaccgctaaattgcctgcgttttctcgcactgggcaaaccatcgatgtggtggtttcttccatgggtaacgccaaaagtattcgcggtgggactttgctgatgactccgctgaaaggcgtggataatcaggtttatgcgttggcgcagggcaacgttctggtcggaggcgcaggggcgtcttcaggcggcagcagcgtaaccgttaaccagttgaccggtggacgaatcagcaatggcgcgaccatagaacgagaattaccgactacctttggcagcagcggcgtgcttaaccttcagttaaataacgaagattttacgctggcgcagcagataagcgatgcgataaaccgttcgcgtggcttcggttctgccaccgcgattgacgcccgtaccattcaggttctggtgccaagcggtagcagctcacaggtgcgtttcctggccgatattcagaatattccagttaatgtcgatccgggcgatgccaaggtcattatcaattcccgcaccggctcggtggtgatgaaccgtaacgttgtgctggattcttgtgcggtggcgcagggcaatctgtcggttgtggtggataaacaaaataccgtaagccagccggatacgccgttcggcggcggtcagaccgttgtcacgccaaatacccagatatccgtacgtcaggaagggggcgcgctgcaaaaagtgaatgccagcccgaatctgaacaacgttattcgcgcgctgaattctctgggcgcaacgccaatcgacctgatgtctattttgcaggcgatggaaagcgccggctgtctgcgggctaaactggaaattatttgatgagcgatttgatggccatgtccggggcggcatacgacgcccaatccctgaacgccttaaagcgtgatgtggcaaaagatccgcagggcaacctaaaacaggtggctcagcaggtcgaagggatgtttgtgcaaatgatgctgaaaagtatgcgttccgccatgccggaagacggcccgctgagcagcgaccaaacccggctctatacctctatgtatgaccagcagattgcgcaggaaatgtcggtgaaaggtctcggcctggccgatatgatggtgaagcaactttccggtagccagtcgccaagtgaaacggccggtactgtgccgatggcgctggataaagaagtcatgcaaaccctgccggcgcaggcgctggcgcagatgatgcgtcgggcaattcccacgccgccgccggaaggtaccagcccgctgtcgctcaataacaataactttgtttcgcgtttgtcgatcccggccaaaatggccagccaacagagtggcattcctcatcaactgattgtggctcaggcggcgctggaatcaggctgggggcgccgcgagatcccgacggcggaaggcaaatccagctacaacctgtttggtattaaagcaggcagcaattgggaagggccggttagtgaaatcacaaccactgagtacgagcaaggcgtggcgaagaaaaccaaggccagcttccgcgtttacggttcttacgtcgaagcgattagcgactacgtcaaattgctgaccaaaaatcctcgctatgcggaagtggcggcggcgaatacgccggagcaggcggcacatgccttgcagcgagcgggttacgcaaccgatccacaatacgcgcagaaattggtgggcgttattcagcaaatgaagagcgctgggaatcaggcggtcaaagcctatacccatgatttaagtcaaattttctaacggcaggcagcaaactgacggcgtaaaaccccgaccgccctgtgatttatccccgggcggttttttttagcaggaatatcgccgtaatccatcgggaaaaatgggtattttttgccaaatttactcaagttatccgatctttggccgataaatattacaggctgcgcggggacttgtacccctcagacagtaaccctattcatcaccgcaggtgacacaaactaccgatcgcctgccgtaaaaggatttctttatgtccaacaatctgattaataccgcgatgagtggtctgagtgcggcgcaatacgccctgagcaccgtgggtaataatattaccaacttccaggtcgccgggtataaccgccagaacgctatttttgcgcaagcgggcggcaccttgtctccagcgggtttcctcggtaatggtgttaacgtgaccggcgtaaatcgtgagtacaactcctttattaataatcagttacgctcagcccaaactcaaagcgccggtctgacaacttattacaatcagatctcgcagattgataacctgttggcggataaaaataacagcctgtccgttaccatgcaggattttttcagcaatctaaaaggtctggaaacgcttcctaatgacgacgcgacgcgtaaaaccgtgttgggtaaagccgaaggtttggtaaaccaattcaagaatgcggataaatatctgcaagacatgaataacggtgttaaccagaaaattagcgacagcgttaaccagattaataactattctgagcagatcgccaaacttaacgaccagatcacccgtttacgcggcagcagcggcagcgagccaaatgctttgctcgatcagcgcgatcagttggttagcgagctgaacaccattattcctgtcaccgtaacccagcaagacggcgacgcttataacgtgtccttcgccggtggtttatcgctggtacaggggtcgaattcttataatatgcgtgcaattccttctagcgcagacggtactcgtatgaccatcggttatgaccgcggtctgggcggtgtggctgagctggacgaatcccgcattacatccggttctttgggcggtacgctgaaattccgcagtgaagcactggatagcgctcgcaaccaattagggcagttggcgttggtgatggccgacagctttaaccagcagcacgaaaaaggctttgatatcaacggcgatccaggagagaagttcttcaactttgctcagccaaacagcgtcagcaatgccaaaaacaccggcaccggccatctggatgtgagctacagcaacactagcgaagtgcaggccagtgattacagcatggaattcgacggcaccaactggcaggttacgcgtctatcagataacagtaaaatcgcgcctaaaaccgaagctgacggcagtctgagctttgatggcctgaatgtttctgtcggcgcaggcgtagcggcgaacgataagttcaccatcaaaccggtggctaataccatttctaacctggatgtggcaatcaaggattcctccaaaattgctgctgcgggcgcggatccaaccggtgtagacggtgggaaaggcgataataacaacgccaaggcgttactggatctgcaaaacaaacaattggtcaacggcaaagcgacgttgtccggtgcttacgccggtttagtcagtaacgtgggtaaccaaaccagtacggcgaaagtgaacagtaccgcgcagttcaatatcgtgaagcagcttgatgagcagcagcagtccatttccggggtaaacctggatgaagagtacggcaatcttcagcgtttccagcaatattacctggccaatgcgcaggttatccaagtggcttcgactctgtttaattccttgctggaaattcgttaaaccgaaccctgcggggataaatactcaatcactgttctgcgatacggctcgcagaacagacgctaaaaggaactgacatcgtgcgccttagtaccagcatgctgtatcagcaaaatatgcgcggcatcactgatgcccaatctctgtggttgcagtctggccaacagatttctaccggcaaacgagtgattaacccatcggatgatcccatggcagcctcacaggtgatcatgctgtctcaggctcagtctgagaatgcgcaatttgccttaggccgcagctatgcgcgccagacttcatctttggaaaccaactttttggcgcagtcaaccagcaccgtgcagcaaatgcaagcattggtgatcagtgccagtaaagactccctgagtgatgatgaccgagcttcttacgcgactcagttgcagggcctgaaggatcaattgttaaatcaggctaactccacggatggcaacggcaactacatgtttggcggtttcaagaatgacaaacctcctttcgttgccgatccggtgaccggcgcggtaacctataacggtggtgatgagcctaagactcaacaggttgattctttccgtaacatgaccgtaggccacacggggtccagcgtgtttatgagtctgaccgccaatgcgcgtccggagccaacggatccggctaccggcacgacgccagcgtcagaaagcaatattttcaataccatcgataccgtattgaacgcgctgaaaatgccaatgaatggcgcatcggaagcagataaaaaagctctccgcggatgcgatggataaagggattcgcgggttagacaactcgttgaataatatcctgtccgttcaggccgaaattggtacccaattgcaggaattggacagtctggatagcctgggcgacgaccgtactctgataaacaaacaacagcttagcgatttacaggatgtagattggaacgccgcgatttcatcctacgttatgcaacaagccgcattacaggcttcgtataaagctttcagcgatatgcaaggcatgtccctgttccagcttaaccgttaataccctgcgttcttacccgctgaccagctcggcgggtccccttttaagtgtacttaaaccgggtgcacttttcggtatgtcatcttttcccactaaggtttgggatggcataccacctttttattcgtccccccatctttagcctcgtttcaagttaacttccaaccctaaagcatcgctataacaatccgttatggcagagtgattattgctattgctgcaagtaattagtgacgtgaaatgatggggctcagagaaagagggcgctagcttcaggccatcccgccaacaacaccggccagacgatcgaagaactcaccgaacagatgctcgcagtagggagcaagactcggcattaacaagcccagaaccagcatacctatggttaaagtgagggggaaaccgatcacgaataccgaaagctgcggcgtcatgcggtttaacatccccagtgccatgtttagcgtgagcagaatagtgatcatgggtaacgcgagcataagtccactgataaagatcagagaaccgatctcggttaaggcgcggaacccgccgccgtttaggggcgcaaactgaatgggcagcgtgtggaagctgtcggacaacatagaaatcagccataaatggccgttgagggacaaaaagagcagcattgcgattagattcagcaatcgcgccagcacgggcatattggggccaccggagggatcgaagaaggtagcgaaagacagccccatttgtaacccgatgatttcccccgctaaacgaatggctgcaaaggcgaactgcatggtcaggccaatagcgacgccgatgatcacttgctgaatggcgacccaaatagcgccgacggaaaaaatgggaatatcaatgaccggcagggacggtgcaatcagaaaggtaatcattaccccaaggccgactttgaccttacggttgatcgatttttcattcagaaccggcgcggtgctgatcagcgccaatacacgaaccagcggccaaaaatattggctgactaaatggctaagctggctggtatcaaaagaaagcatgtttagccgatcagcgtaggcaagctggtgaaaagattacgcatgtaatccagaatcaaattcagcatccatggcccggcgataaccaaagtggcgaagactgccagaattttaggaatgaaagacagggtcatttcgttaatctgcgtggcggcctgtagcaggctgaccaacagaccgctgaccaacgccgccagcaatagcggcgcggccagtgccagggcgattttcatcgcttcagtgccaagcgccattaccgattcaggagtcatagcctacctttgtataaaatgagctggatgagataatttcaggctaactgtagaaactttgcgccagtgaacctagcagcaattgccagccgtccaccagaacaaacaacatcagcttaaaggggagcgagatcgtcgccggcggcaccatcatcataccgagggccattaatacgctagcgaccaccaaatcgataatcaggaacggaataaatacggtaaaaccgatctggaaggcggttttcagctcgctggtgacgtaggccggaagcaaaatacgcattggcaccgcttctgggccttcaaacgcaggcagattggctaaacgggcgtacagcgccaaatcggtttcccgggtttgtcgcagcataaattcccgcagcggctgtgagcctttatctatggcgatgtccatggtgatcttatcctggctaaacggcagataagcatcctgataaactttgtcgaacaccggtgacatgataaagaaggtcaaaaacagcgccagacctaacaaaacctgattcggcggtgccgatggcgtgccgagggcgttacgtaacaaacccagcacgataatgattcgggtaaaactggtcatcatcagcaacgccgccggtaagaagctcagcgaagtgatcaggactaaggtttgtaccggtagtgaccagctttgcccgccgttggcgagaggctggctgataataccgggtaattgcgcaaacaccgccggtgagaacaacagggcggtgaaagtgaataggggggtaagcagacggcgcatccgcaccgttaaggcaaaagtggccttgaattcagggcgctgagacgtcatgccgatttttccgggtgtttcaggattttttgcagtagctgacgaaaatcagccggtttagtggtatctggctcgacggtagggtctaccggagggcgttccatcgtgtgcaactgagtgacctgctgtgaagtgacgcccagcactaaccaggtgttatctacttccacaatgactacgcgctcgcgctggccaacctgacagctagcgcgcacattcagcaatttgttattgcgcgcctgcggagcaaagcccagccgttttaccagccaggcaccgcacagaatcagtaaaataacgccgccgagaacgctgccaacctgcgttaataccgcaccagccggaagggcaggtgccgcgggaacggctgtttggctactcactccagggtgagaattggcgaaaccggtgaccggcgtttgtgcttcactcattagcggcttaaacggcgcatacgctcagatggcgtaatgatgtcggtaatacgtacgccgtatttatccgcaaccactaccacttcaccttgcgctatcaggtaaccgttaatcaggatatccagcggctcaccagccagaccatccagagaaaccactgaaccttgcgataggcgcagcaattctttgatggtcattttggtgcggcccagctctacggacagttttaccggaatatcaagaatcagatcgatttcctgcaaattgccaagtgcgtccggtgcctccagcgatttgaatacgccttcagttgttgccgttggtttttctgtcgcttgctgctcgttaaacgcatcagcccacagatcatccacggattcctttccatcgccagacggcagcttagggtcactcattgggctgttcctcatttagagcattcaaaatagggttaatcagatgttcaacacgaagggcgtattgcccgttcagagtaccgtactggctggttagcaccggtacgccatcaacgtgggcgatcagccggtctggcttatctatcggcaatacatcgcccggtttcagttttaaaatctgagacaaacgcagcgagatctcggcaaaattggccaccagctccagctcggagtgttgaacctgttttaccaacgtttcgcgccagtgggtgtcttcctgacgtgagttttccagcggcggattggtcaatagctcgcgcagcggttcgatcatggcgaaaggaatacagatattgaattcgccgcttagcgcgccgatttccacgtggaatggcgtggtgaccacgatgtcgttcggcgaggtagtgatgttggtaaatttcacctgaatctcggaacggacatattccacgtcgatcttgtaaatggcggcccaggcgtcgcggtaggcgtccagcgccaaacgcagcatgcgggtaatcacccgttgttcagtatgggtaaattcgcggccttccactttagtcgggaaacggccatccccgccgaacaggttatcgacggcgataaacaccaaacttggctcaaacacaaatagggcagtgccgcgcagcggtttgagatgtaccaggttcaggttggttggcaccggcaggttacgggcaaattcatggtaaggctggattttaatcgggcctaccgtgatgtccgggctacgacggagcaggttgaacaaccccatgcggaactgacgggcaaaacgctcgttaatgatctccagcgcgtgcagacgctcacgcaccacgcggcgctgggttgtcggatcgtaaggcttaacgtcactgtcactgccgactatggcaaccggctcatcgtttccgctgtcgccgtttaacagtgcgtcaatctctgcttgtgaaagtatgctgtcgcccataatgattatcgcagtatgaatgcggtaaacagcacgtcgctgattacctgattaggttgacctttaaccattggcgggctgaggacggttttgatttgcgccattaaccgctgtttgccttcttcgttcgccaggctttcggcagtctggcgagacagcaacaacagcagacggctgcgaacttccggtaaatagtcgttcagcgcgcgacgggtattctcgtctggcaggcgcagagtcaaaccgatgtacagcacgcgatccaggttgttgtccggcgtgatcagattaacggtaaaggtatcaagcggcataaagaccggagccacagggacaggtttaacgttcgcaggcttgctgttgtgcagtacccaccagctatagccgccgcccgcagcagaagccacggcaatcagtactagcagaatcacccagattgaacttttacgcttggccgggatggtgttatcagacatggggaagacaaattcctgtttcgtgtatctgcataataacgcgggtatgactcgttgacggatgtcgccaccttggcaacttctgacaacctacccgcgttaaacgaataatggtgatgattatcccgcgtatcaccgccggcaataggcagaataggtgggaaaaaacggcctacctcgcccgtttgttcaattttaggcgaaaatatcaacaccgccgttgccggatgctaaagattgcagtgcggctggcgtcaccaacggtgtcagagaatcagccgattcagcgttttcgccgtaagcaggctggccattagccgcatagttttgctgattttgttgatgctgctgttgctgagcctgctgccactgagacgatccttcgctactgacactgctctggcccaattgaatcccactttcagctaaagcatgacgcagccccggcagagcggcttctagcgcggcgcgaacctgaccgtgagctgaggcgaagtgcagctgcgcctgattatcttcgatcttcagactgatttgcagcgcgcccaattcctgcggatgcaaacgcagttcggcattttgctggccgttgcggctaaacattaatacctgctggcctaacgcctgctgccattcctgactgcccaactgagcgctcaaatggccggcaaccggggcggaagcaaggccgccggtaggcgcagccatgattgggctggagaccggcggtaatgaaggggtgatagcgctggttaacaaggctttctcgccgctattgactgcttctgtcggggcgattaacgcactcagcgcagcggttttattggcggcgatggcgctgttgtcctgtgtctgaccggtagggcggttctgacgcagttctaccttttcggttttggtttttacctcggccaataggttattcgcggggttaccaccctcttttttaccgttactcaaagtggtactcaacagcgcgcccagctctttatcctgaccggttaagcccagcagactgcccagcgcttcgcctttacctgcggggctacttttggagccagcattcagattatcctgtgcggtcagccctgatttcaggctgttaccgcttgccagtgtagtcgctacctgatggggcaacatcgccagcaaagtatgtaatgggttcaggtcgggtttatcgcgctgaatttccagtttttgatcgtcttctggcgttgttttcttgccatgagactcgcctgtctgacctgcggccgttaatcctgccggcagggtcgcggtgatatcacccaatgcggccagcaactggttaagcttgctactgccttggctggttttatccccttcgacatcggcaatgttaccggtgacggcggctaaagaagatttcagcgctttggcatcggcggcatccagcttctgagccaattggctcaattggccgcctagcagctcggcaaaatccgccggtaaacccgcatcgctgaataacgcagcgatagaagaagacgctgcaccctcagtttcggttggtgtcgcaacaccgggcagtacagacagattcatgaattcaggctcctttgtgagctgcgctgggcaaactcatccatcaatttttgatccatacggttttcatggtgacgctgggtggtttccgcccgttcctgcaaggtttcgaacgcgttgaggcgttgctgtttctcttgccagtgcttgacggctaaatcgacgcgctgattccattgcaatagctgctgccggtgctgatcgattgccaattccaacgtctgaataaactgctgataattctgccaggttgaggaggccatcccgtcggataaggtatcgttcagcttgacccgatattcatcctgatagttgagcaacatattcaattgctgctcggcttgcaggtacgattgacgcacctgtcccaactgtgtactggccttttcgacggccttctgcgccaagtcgcgcagggtaacgagaggtgattgacttttcatcgtattcctcatctattacggaatgaagattggcgtcagtgagctgacggccaatcagccgggaaacagcgccttcagatgctgacaggcatcctcatagctacttcgctcaaacattccttgctgcaagaaggtttccatctgggggtaaagcaagattgcgcggtcgagcagcggatcgctccctgccgcgtaggcaccgacgctgaccaaatcgcggttgcgttggtagctcgccagtaactgtttgaactgacgaactttgctgtagtgatcctcatcaatcagcgccgtcatggctcggctgatggaggcttcgatatcaatagccggataatggccggattcggccaaacggcgggacagcaccacgtggccatccaaaatggcgcgggcggagtcggcaatcggatcttgctgatcgtcgccctcggtcaatacggtatagaaagcggtgatagaaccgccgccgctgacgccgttaccggctctttcgaccaacgccggtagcttggcgaagacagaaggcgggtagcctttggtggcaggcggctcgccaatggccagcgcgatttcacgctgtgccatggcataacgcgtcagggagtccataatcagcagcacatgctgaccgcgatcgcggaagtcttcggcgatacgagtcgcgtaagcggcaccctgcatacgtaataaaggggaaacgtcggccggtgcggcaatgactaccgaacgtgcgcgaccttctgccccaagaatattttcaataaagtcttttacttcacgaccacgttcaccgattagcccgaccacaatgacgtccgcctgggtatagcgtgccatcatgccaagcaacacgcttttaccgacgccggaaccggcaaacagacccatacgctgaccgcgaccaacggtgagcagggcgttgatagtgcgcacgcccacgtccagaacctgttcgatagcggtacgctgcaacgggttaaccggcggcgtaatcaatggtgcgcgatagccggtttctggcgcgggtaaaccgtccagcggcttggcgctgccatccagtacgcgtccgagcaattcagggccgagaggcagttgtttactggcggaagcgccattggcggtaatgcgtgcatagacgcgcgcgccgggcacaatgccttccacttcttccaacggcatcaaaaacaggcgctggccgttaaaaccaaccacttcgctttctacttcctgcacttcgccgccgtcgtgtcgttcaatcaggcaggttgcgccaaggggcaattgcaagccagtggcttctaaaaccagaccggtggcgcgggtcagacgaccatagcgccgaaccgaaggcgactgaacgattcgctgttccagtttatccagtgtagtcagccagcggccaagacgggcggtcattacaaatctcccggtgcggccaggcggcacagctcatgccaacgggttgcgacgctggcatccagatcgccttcttccgcgctgactttacaaccaccggcgtgaatctggctgtcggccagcaaacgccaaccgtgcaggctcagggtggcgcctaagcgctgctccaccatcgccaaatcgtccggatttacgcgcaactgcggtttgccgttaaacattggctcttgctgaatcagctgttggatttgacccagcagtgcggtgccgtcacaaatagccggttgccccaaaatctgtttcgccgccgtcagcgccaattgcatcaaacgagaggcgatgacgctgtcgagggaatcgagcgtattttggaaatcagcgaccagcgcctgccagtgagcggtcatcggctcttgcagtttctgcgcttccagcaaaccttgttcacgcccttccagcagcccggtttgatagccctgatccagaccttcctgcaaacctttggcgaaaccttgctgccgaccctgttgctccgcctgctgttgcaaactttgcagcacctgctgttggtcgggttcctgtggttcgcctgcttcgtcggtaaactcggtcatcgcgacttccggctgggtagccggagcgtcatcaaactgactggcgaaatccttgggagcccaaggctgccagggcagggcattaagctgatcagacatagatgtcctcgccgccgccaattacgatctcgccgctttccgccaaacgacggacgataagcaggatcgctttctgttcgctttccaccagtgacatacgcactggcccacgcgtggccagatcgtcgcgcagaatctcggcagcacgcagagacatgttgctgaggaaacgttcgcgcagagcctgatccgaccctttcaatgccaccaatagggactcggagtcgatctcttgcagcaaacgctgaatgctgcggtcgtcgacgccaaccagattttcgaacaggaacatctcgtcgataatcttttgtgccagttcgccatcgtattcgcgcatggcgtccataaccgcttcttcctgctgggttttcatcaggttgataatctcggcagcggtgcggataccgcccattttgctgcgtttgagattctggccgtccaacaggttgttcagcacttcagtcaattccgccagcgccgccggttgaaccccaccgaaggtggcgatacgcagcatgacatcgttgcgcagacgttcgtcgaacagcgccagaatatcggcagcctgaccgcgtttcaggtgaaccaaaatggtggcgatgatctgcgggtgctcgtcccgaatcagatccgcagccatctgcggttccataaagttgagggtttccatgccgctggtggtttcgcgagactccagaatatcttccagcaggctggaggcacgttcttcccccaaggctttcaccagcacgccgcgcaggtattcgctggcgttgacgctcagcgctgcatattgctcggcgtcgtcttcaaactcgactaacacgtcaattaattgctgatgagaaacctgacgcatactcgccatggtggtactcagttgctgcacctcccgcgacgagaggtgtttgaaaacttctgcggcgtggtcttcgcccaacgtcatcagcatgatggcgctcttttcagttccggtcaggctcattggtctgtactcatccattgacgaattaccagcgcgacaacgcgtggatctttatctgcaagttcgcggatacgctgggcctgaacttcagcgcttacacgctgttgtgatttcttacgcagggccagctcttctttgctctgtttcactgtttcagcggtttgtgccgtctgcgctgcgttattagccgcagtaatcgccggattcacttcctgtttcttagcgataaacggacgtaccagtttgcgccacagaatccaggcaaccagcagaatcaacagataacgaccggcactcatcaactgctcgaagaaggattgttgtttccagaacggcagggcgctgctggtttcttcggttgcggtaaacggcgtattgaccacgtttagcgtatcgccacgcgcggtagagaagcccatggcttcacgggttagcgcctcaatttgcgccaactgatctttgctcagcgcgatcggcttgccggttttcttgtcgatatccagatagttaaccaccacggcgacggacaggcgttgcaccatgccagcctgttgctgggtgtgacgaatagtccggtcaacttcatagttagtggtttcatcccgacgactgctgcccggaacgctattgcggttgccagtgccggcggtgttgttgcggttagccgcagtggctgcggcggtattcgctgctgcaccggtagcccccggcgctgcgccaactggcggagtttcaatcggagcaaccggcgtggccgaaggctgattggataaagcgcccggaacgccgccgattggcgtgccgccaacctgttcgctttggcttagctgctgtgaccgtaccgcgccctgttcagggcgttggtttggtttgtattcttcgtccgtctgctcgcgggtcgcaaaatcaacctgcgcggtgacctgagcgtggacatttccgttaccgaccatcggagccaaaatagactcaatgcggcgttggaagcgggcttccacctcattggtaaatttcaactgagcggcattcaaatcgcgaccggcgctatctgattgcgtcaacaggcggcccgtttggtcaacgacggtgacgttacccggaggtagaccggccacgctgctggaaaccatataaacaatggcgttaatctggccatcatccaatgcgcgcccaggctgtaaagccagtgtgacggaagccgaaggggatttttgttcacgaacaaacagcgaaggcttcggcaatgccaaatgaacgcgtacgttcatgaccgggccgagggtttcgatggtgcgggataattctccctccaacgcccgttggtagttgatttgttcactgaactggctgatgccgaatttttcctgatccagcagttcaaagccaacggcaccgcctttcggcagcccttgctgcgccaggcgcagacgggtttcatgcaccttgtctgccggaatcagcagcgcaccgccgttttcggcaaagcgataaggaatattgagctgagtcagttgagtgacaatagcgccgccatcgcgatcgctcaaattgctgtaaaggacgcgataatccgggcttttcgcccataacattaaggcgacaacgatcgacactgcggcagcagcggcgataagtaacggaatttttggattggcgcgcaggcgattcaacagcccgctaaagccattctcacggttctctacgccagttatcgaggcattcatacgcattccttgccaggctggacaacgttgacgttagtatttgtgtaagtagtgtatcgaaacaaaacagactccctggtacgtaagcgacaaagcagcaatcgccggtctccccttttatgggcatgccattatttgtcggattaagggaatttgatgagtcaataaggcgatgtttttgtatctaattagccggtttagctaaaaaatgatgtgttagggtgtcagcctgaaaataccaatctgtgccgggcttaaagaatatccgtcctgagcacgcgctttttactgaggttttatgtccattcaaggtattgaaggtgttttgcaacaaatgcaggtcagcgcattacaggcggcaggaacggccaaagtgctgccggctgagccgggttttgccagcgaactgaaggccgcactgggtaaaatcagtgaagtgcagcaaacggctcgtactcaggcgcagaatttcgaactaggcaaaccgggcattggtttaaacgatgtgatggtcgatatgcaaaaatcctcaatctccatgcaaatgggaattcaggtacgtaataagctggtttcggcctatcaggaagtgatgaatatgggcgtttgatggcaacgcagctattcagatgatgcttgcccataaaataaggttgagagcagaaaagttattttcatggatataatggactaagataattaactaacaaggatgaatgtatgagtaagaatcaaagaattgctatgtttgcggccataggtggcgttggttatctggtatggtacgtaattaaacatactacgggattataattttctattattattggctccccacttgtcatcaatgctactggtagctccgaacgatagggctgcccgagttgatcattatttttctatttatgttatgacgcttagcaaaacgctgatttcctagcgccactgaaatgcttttccctgaatgactccacattgtcataggataatgtggagtcattcaggggggctattcgacgtaatcctgctgtcagcttccggacaattcatataaccctgttctactgcctgattataacggtttaaggcgacgaagaacggtgagcgatggccatctttccgttaagtatcatgaaggcaatcccctcttatcttactgattatcatcatgatatacggtgtcccgccggtgtttatccccgattgtttagtggcttaggtagtgaaaatcgtcgcctgaacaacgggcagagaatcatattaaaagaagcctaggcagcaggcgcttaatatcggaatagccagtaatgatatgtggcgtatgatattaaatatccttaatttaaatttcgattaatctttcgtttaactgaatttattaatcaagcctcaattaatcaacggagtttccgcagtaaggactcaatcagtcagcaggaaagccttatattataaagcgtcgctattatatgtgttggcgtctattatttatatgtttgtttatttcaattaatgttaaataagaatggccaattaacatgaaaggaacagctatagtcgaatgctatattcgacatgatttaattgattttttgtacatcctttaattacattcattttagtgataatgggtggagtctagggatattgtcatgccacagttaaaactcactatttgttatcaacacaattgttgtattaatcaatgctgtgtttacatacaaatcttggaataaaaaggatgaatccatgagtatgaaattaagcagtaaaatctttgcttttgctccggtattgttggtcgcagcctgtaccacgacgccattacccccagtaccgcaggctttgctgggcgtagatcgcggcatggcaggaatagataactgtgcggtagggtgtccaacgggaagccagagtgatgaaaccctggttcgagatagttatacgttgaacaataatccaagtactaagtttgctaactgggttgcctacaagattacaaaatctactcaggccagcagccgaccgcgtaactggaaaaccgatcctgatttacctgccagcgatactctaagccctgatgattataagaatgcgaatcaagtgctgaaaatcgatcggggacatcaggctccactagccagtttggccgctgcccctgactggcagagtcttaattatttgtccaatattacaccgcaaaaagccgcgttaaatcagggggcatgggcgaggctggaagatcaggaacgtaaactggcgaacagggcagacattagcgcggtttacaccgtcaccggcccgctgtatgaacgttctatggaaaaactgcctaatgtgaaaaaaccgcaccaaattccaagcggttactggaaaatcatttttatcaataacagcccggcagtcaatcattacgccacttttatcctggatcaggatacgcccgccacggccaatttctgtgattttcaagccacggtcagtgacgttgaacgtcgcgccggtttaactttgtggtcgaacttaccgactgaaattcaggcgggattgaaaaaaacgcccggcgtattatcagagcaaatgggatgctcgccagccaaagcataaaatgtagtggggcagcctaaaaaagaaataaacccgggagatatattccgggttttatctgtcgtagagtcatcggcggcttaaccctatattttcactcagataaaacctatactgaagccactttatcactgatggttagtctattgatgagattatttcacaggattaaagggcgtatatcccccactttttgtctggccgtcatggtcgctattaacggttacctgatattagggccggtactttcccgtaccttaagttatgttccccaaaccctgggtagcataggtacatggaaagaaacgttgtccatgttagggctattggaaattccccgttttgtcattggtcttagccttattctgatggcgataggtttagctcttaaagcgcgtactgcttgggttttcactctgtttttgctgctggcaatgacattgctgaattttatgaacggtaatagtgatgtgcatattaccggtttgtccgtcgctattattcttggcttactgatttgttggcggcagttcgatcatcaaagcctggccagtagcagcttatttgctatcgtcagtatttcttcattattgttgtacgcggtgattggcacgctttatttaggcgctgaattctctcctgcggtggaggatctaccgacggcgttctatttcgcgatagtggcgatgtcaacggtaggatttggcgatattgttccggcgaccacgcatgctcgcatgtttacgctttcgattattattatgggtattacggtatttgcggcatcgattacagccattgtcgggccgatgattagccataatatccagcgaatcgttaaaggcaggatctctcacgtgatacgtaaaaatcattttattattgtcggtacaaccccattggcactgaatgtgtatcaaggtctgcgggatcgtggcgaactggttaccctggtggtggctaccggaacaacggcggagttaccgaaaggcgcagacgtggtgactggcgatccgtcatccgtagcgactttgaaagtcgcaggtgcagataaggcgaaatatattattaccctatgtaatagcgatgccgagaatgtctttacccttttggctgcgaaagaagtggcagggccagagactaaaacaatttcgttagtcaatgaaagccagaatcagccgaaaattaagcgagttaatcccgatatggttttttctctacagctattggggagtgaattgttagtcagaacactcagtggtgaaactatcaataatgagctgatcactgaaatgttctttggcagttgcgtgaaggcaaattgatttttcagacagcactgacgatattccgttaagtgccaatagcctttatcccacgccggtaacgcccattccggcgtggagctattatcagcaacgatatctttaatcaccataatctgtatccgtagcgctcacggtcatatctcttggtattacggggtgccaaccttacgtagcagagtggtaatatcgatgagatcgacttgttctggttgaatataggttttggcatagtcttgccagattcccgattcgataaacaagataaacaattgtcgatcaagatgattgtcgttaaccatattcgccatgatattcaatgactcggacagttttttacctgctttataagggcgatctgctgcagtcagcgcttcaaatacgtcagcaatggccatcatacgcatggtcagactcatctgctgggcattcagttggttaggataacctttcccatccattctttcgtgatgtccaccggcaatggttggtacgtttgacatggtacgagggaaggggagctttttcagcatgatgatcgtctgcatgatgtgttcattgattttataacgatcttcttccgtcagtgtccctcgtctaatactgaggttatacatttcaccatggttatacagatgagtgggtggttgcaatttgaaatcataatattccggatgtttgattttatcgtcccgataaataatatgttcctctttgtcggccaaaagtggctcttgagccggtaagggtttttgcggtgtgcggtttttcctagacatctcttcattgcctaggccggttctatcatcgagcgtccgtgtccagcggtgttgagcaatatcatgaatgcgcttaatggcttcatcggataatccctcctgaccaatattggtctgggcgatgaaatagtagtcctcatccagtttccgtaattcctgatttatttgcgagcaatctggctcttgcccagattgggctaggcattggcgtaaaaaatcgatttctttctctcgttttaatacttcgaaacgcatacgaatttcatgaatccggttataaatggtttccagcttggtggctttatcaacaataaattcaggagtggtaattttcccgcagtcatgtaaccagcacgcagtacgcagttcttcccattcgtcattacttaaactgaaatcggcaaaggggccttctttcatttcaacggcaaccttcgccagcatttcggtaataaccggaacccgttgacaatggccgccggtataagcgcttttggcatcaatagcgcctgcaatcagcttgataaaggaatccagcaggtttttttgttcctgcagcaaatgctgagcctcgacagaaatggacaggctaccgactagcgcattaaccagttgtatccgtgaatacttcctttcgtgattgatcgactcatcatcaaagagtaataagaatccgagtaaatgatcgtcatgtcctcgtatcggggcaataataaaacgcagaggaagctggtcggccaatacctcatacagggcaggccataaattatctttattcactattcccgatgaggttctgccgtacatcacaggattaaacggagtgaaatagctatcgctaatagccagtttaggcatgttgctaacgtcaatggactggtttttccattgaaaggcgatagggaggaatgcggggtttttggcatcattcaggaaaataacaccgccggacatactcgcaatttgcgtggtttccaataataaaccttccatttgtgccgcaaaattgtggccagcggcgagtatattccccatcgaaataaattgattgagcgtcaatttcatcttcttcattgatgcgtgtaattcgtcaatttcctgaataactgacggttcactttcccgttcatcaaaatgtaaatggctaatggcatcggcatcctgacgtagccgtattaaggggtgagatattctcagagaaaagaaccaaatgatgggtaaggttaataacaggagcgcgcaggcaatgagagtcgagttattacgaatctggttagcattagcggtaagatacgacgatggtgtggcaataattaactgatatttattctcatttatcggaatgatgctgccataccattcttgctgttcactggtgaatatatggctttggctggttgcccccgtagatgatgttttgaggcctaacaatgacactaatactgggctaatactttgactctctcctcttgaatttaaactcgcgatagcatcattctttgcgtcaataatgacggcctggctgccaataggtaaattttgctgttgtaagaactcactcagtgaagcgagagatatatccattcccactactgagcttctatttaacgctcttttactaaaggttatccccggttctttagtcgcatgatagatataaactggcgaaatagtgacaccgttattctgcaatgccgaggtaaaccaggtgcgtaatcgcggatcgaaaggatccttttctacccgccggttagcaattatttgttgcttcgcatcaaggaaaatatagtcttttattggtgattcaccggctatttggctgcgctgtattatccattcggtattggggggagcacctaatatagggcgattagtattactggctcgccttagcagaaagaaatcaccgttgtcataaccactataaatagcactggcatacttatttgaatttaaaatctcgctgagccgttcaatcgagaccatttgtcgttcaaagacggtgttgtcggttatgggtaagctagctaagatattgactgacatagacatagagtgagtaatgctatccagttctgtggcaatggctttccctgttttttgatattgttccagagtactgctttcggtcagtttggtgagctggtggtgattaaacaaaataatgacggtgccaatgatcagaattagcagcgtaaataaggatgctatctggatatgaagagggtaacggtttttaagactcaaagtcattcgtagcataggtacctgcgtgcagattacctccgattacttttataatagttgttattgcaaaaactgtattcaagagacataagtatcatcattaatttgttgatattaaactcttttatttattttttcgaagataaaaaatgcgggttggtaatacgctaacgcgtctagattcaactaagaataacattaaacattttaaaatagcttacccgccgccttgctctataacaggaataggctaggaataagacggtttgaaatcactattgtattgcgactctgtttccaacgagcctgacgccagtcggtggtggccgcgtatggctgttggcgcgaagccaaaacgtttacggaatcgctctgcaaagcgtgatgaactttcatagccgacgcggttggcaattaatgatatcggccagtcggtcgcttgtaacagcgttaatgcgctagtcatgcggacatcgatcattaaattgcgtaatacaacgttctcggcagaaagtttccgtcgtaataccacttcgctcatagacattcgctctgcgacctcggcaaccgtccatattttatgagggtcggttgccagacaacagcgtactttttctgtcagcgtttctgcatcttttattaagaacttaacgccacgctgggtcagccaaagcaatagctccaccatgcgatggcgaatgatgggcttcggaatatcattgttatcagctaataccttaaaagtattggtgaaagcattgataaactccggcgcaggattacgcaccggcatgacatctggtattacggacaggtcatgggctttgggattatgggcaaatgtattgattaactgaggttcaatactcagcgtatggctgaagaaaaccccatcagcagataacccgttgactatatctatagtttgaccaccgctgatagcggccatctcgccgggcaggattatacattcctggttttcccagcgaataaccttatggccgtggttaaccataatcagcagtgggtgttgtatataaatcgaggtgagtgcaagttcagtatgttgaataacatgccttgaactgccaatccccgaacatagattaattgtacgttccatcgatattcatttcacagtctttacctgagaatatctttacgcgttgcgcaccagacaagcaacttattttaatacaaatttagtgcgtagtgctatttcgtcgagaaaaaaaactggtttgttggcgcacacaaatagccatgtaaacagggcaaacacaccgataaaatcacgctcatccggagtaataaaaaaacattacttgcaatgttaatgatttcattcgaatgtaaaatgagaatatctatcttgttgttatgttgataaaaccatcgctattgtgtttcacctaataacaccgcatggtctgggaactgaccataagtattatttaccacttgttgtcgggttgattgtccgaccagttcgcttaattcattaaggcgtagctgtaataagcgcttaatttcagtttcattatctaaaatgttttttaatttctttcttaatatctcttgcagtgaaagagacgaacaagaagaaatggtcacgttggcggtactctcaacagctttcagataagtcatttccagatcaaccagcgcatcccaatttccctcaattgcaaaggcaagcatttgttcactgagggtcaggatatgttgatattcggatagaaggtgctggtgacgttccattaaatggggtcctaattgggttgataattggggccgatctgccgccaggcatcagcaatattttcaagcaaggcttcgacttcgacaatagcctgctcgtcattatgcaaattggcatgcagtaagcgacgtgacatatagtcatacaacgctgacagattttctgccagctcgccgcctttttccatatcaagcccagtacgcaggccgttatcaataatattgatagctttggaaatagctaatccctttgcggcaatctccccctgattcatcaaaatacgtgcgcgaaccagggcgctttgcgccccgtcgaacagcatcacgatcaactggtgggggctggcgctcatgactccgctttccaatcctacctgtgcgtaagcctggctccctgaccggttgtacatgttttctatcctttgttatttaaattgtgccaacagcatgttgcctgtgtttttgaacgaggtaaccaatttatctagctgaccgaactggatcttgtagcgttcaatcgtggcattgatattggctgttgttgaaataacctgtttatccagatttttcaatgaacggttgatcccgtcggttgcacttttcagcgtacctttcgaggtatcaagggcaccattcagcagtttatccatttgggtagcaaacccggtagtttcaccgtccccggcaaagaactggttaacgctgcctggtttttctttcagcgctttatccagtttctcgttgtcgattttcagcttcccattaagatcctgagtgatccccaggctagctaaggttttgacatcgccgccttgagcagaagataactgggctttcagttgggtctgaatattacgcagcgtattgtcaccgaccaattcaccgttgccggacgactgctcttgacccgcttcaaccgcggtatatttggtcagtgagctaaaagtggtttgcagtgagttataggcatcaacaaaagcctggatcgcatctttggtcgctttgggatcgcgtaccacactcagaacttctggggtgtcaggtttggtgacgctcttcaacgtaagcgtcacaccagcaggtgcatcggtaattacgttactttgacgagtaatatcaatgccgttgactttcaatttggcatccgctgctggaacggtttgcttcatgccatcggtgctggtgcttcccggcgtatagttcaggatcttgcctaaatcatcatcgccagtcacgctaacggtcatttccgacttggtgccggtttcttttgaagtcagcgaaaggtaataggtatcgtcatcacccttcattatactggcggtaacattgccttcctgcttgttgatagcatcgcggatatcattcagggaggttttatcttttgccaatgtaacttccatcggcttttcttggccaggctgagtaatagtaatggttcttgtttcattactattgcccaaattatcttttgtgttaggcatcttgccggatagcaaggattgcgccttagccaattgagaaatttcaatattatagctaccggcgctggcagcactgtcggttgttgcactaaatgcttcatttttactgctgaccgacgtgccgtttattgtgtctgcttttttcagggccgccgcagcagtttccacttttgccagtgcgttttgcagcacgccaaatgcagatagtttccctttaaagctggtttgttgctgggtcagaggggtaagacgcttttgttctgctgcagacaaaccgtctaacagttcacttaaattcattcctgaaccgctacctaatgagctgatacttgccatgtctaatccttaatattcaagtgtcgtgatagcgttatcggccaggaggaaaaaaagtttacacataaaatacaaatagtgatggatggaatagcggggcattaagtacagctatttgcgctattgaactgaatgacgggtatatcgtgtgcatatttatgcatcaaggcagaatgatttcaattgcggattaaagttctcggcgcaggtgccgatagccttttgtgatggcgacgataactcagtccaatcgccaataatactcattagctacattgaaggaatatcactatggcggtaattaatacaaatagcctgtctctgatgacacagaacaacctgaacaaatcccagtcttctttgggcaccgccattgagcgtctgtcttccggcctgcgtatcaacagcgcgaaggatgatgcagcgggtcaggcgattgccaaccgtttcacttctaacattaacggtttgactcaggctgcgcgtaacgcgaacgacggtatttctctgtctcagaccgcagaaggcgcgttgggcgagatcaacaacaacctgcagcgcgtacgtgatctgaccgttcaggcacaaagcagctctaactctgcatccgatatcgattccatccagtctgaagttaaccagcgtatggaagaaatcaaccgtgtgaccaagcaaaccgatttcaacggtatcaaagtcctggacaaccgtactgcgaccgattccaactacgatttccaagtgggttctaaagacggcgagaaaatcagcatcgctatcggttcaagcgcgggctggaacctggcagcggcgggcgccggcggcgtttctggcgatactgtcaacacttaccaattcaaaacgactacagcgctgggtactgcccaaactgatgtaacgacgaaaaaaaccgactttgataccaaaacggctgacgctgcggcgaaaaacagcgcttatctggctgcgaaagcaatctctgatgcatctggcgtagcgggtgatgttgctgcaaccgcaacagctaaaaccgcatttgataccgccactaccgctgtcggtactgccaatactgcattgaccgcctctaacgcggccttcaaaacggccttggatacatcaacggccgctggtgaagcggttaatggcaatgcacgtaccgttgcagctaaaggttttgatgtactgaaaggtaatgtggattcagctggtctggctgtcggtacgacgccattggctgatatcgataaagccctgaaagcggtcgatactcagcgcagcgtgctgggtgcgtctcagaaccgttttgagtcaaccatcaccaacctgaacaacactgtaaacaacctgacttccgcacgtagccgtattcaggatgccgattactctaccgaagtgtccaacatgagccgtgcgcagatcctgcagcaggcagggacttccgtattggcacaggctaaccaggttccacaaactgtcttgtctctgctgcgttaattccccgtcgagcaggatatcgagcctccgcattgcgggggcttttttgtgtttgttatttattggttttttaataaaaacacgcgatttaattaaagctatgaatgcatgtgccgataaataaagggacggtgattgaagccgtaggcaagaagcctaaacattagccgaaacatatttaaggaataataccatggcggtaattaacactaacagcctgtctctgatgacacagaacaacctgaataaatcccagtcttctttaggcaccgccattgagcgtctgtcttctggtctgcgtattaacagtgccaaggatgatgctgcgggtcaggcgatcgccaaccgtttcacttcaaacatcaacggtctgactcaggctgcgcgtaacgcgaacgacggtatttctctgtctcagaccgcagaaggcgcgttgggtgagatcaacaacaacctgcagcgcgtacgtgatctgaccgttcaggcacaaagcagctctaactctgcatccgatatcgattccatccagtctgaagttaaccagcgtatggaagaaatcaaccgtgtgaccaagcaaaccgatttcaacggtatcaaagtcctggacaaccgtactgcgaccgattccaactacgatttccaagtgggttctaaagacggcgagaaaatcagcatcgctatcggttcaagcgcgggctggaacctggcagcggcgggcgccggcggcatttctagcgatactgtcaatacttacgcatttactaagaaagctgcggttgatacagcacaaactgattacgacgcgaagaaaaaaatctctgatgccgatgccactaaactgcctgacaccgctacagctaaagcgactcttgatgccaaaatgaaagaagcgactgacgcaggcgaagcggttaacggtaacgtgcgtaccgttgctgccaaaggcttcgacgtactgaaaggcaccgtgaccggtggcgccgccggtaccgcagatgccggtggtcctttggctgctatcgataaagccctgaaagcggttgatactcagcgcagtactttgggtgcatctcagaaccgttttgagtcaaccatcaccaacctgaacaacaccgtaaacaacctgacttccgcgcgtagccgtattcaggatgccgattactctaccgaagtgtccaacatgagccgtgcgcagatcctgcagcaggcggggacttccgtattggcacaggctaaccaggttccgcagaccgtattgtctctgctgcgttaatttggtcagggttaatcatacaaaggcggctcttagccgccttttgtcatagggtagcatccccagaagggtattagcctatgatacatgcaagcattccagcaacgggaaggggtattaagtgaaagaacttcaggtcattcagccagattatgtggctaactttagctgtgtaggctccgcctgccgcgaccattgctgtaaacgctggagtattaccctcgataaagagacttatcgaaaatatgcgaaaagccagaatgcggatatcagacgtatcgctgtaaccaatattattgttagtaagaaaagtcaggcaaactgggcttcaataaaattgaatgaagaacaaaactgcccttatttagatgaagaacgtctgtgtaatgtgcataaacgtctgggagggagggcattaagcgttacttgtgccacctatccgcgtatggagcacatatataagaagcaaaaattaaatacgttaaccatttcctgtccggaagcagcgcgccaggtattgctgaatcctaatgcattaaatatgcaagcgacgactattactcaaacgggaaattttaaagcttctgatctgaatatggaaaatcagttggttaatctgttctgcgctaatttaattatgccggagcaaagccgtattgaagaaaatatttacgccatcacatcattcttgctgtattaccaaaaattaagtggtgatgtagaaagcaagttacccgcaatggaagctgcctttggtgatttggtgaataaattacagaatggagatattgcaggatatcttagtaacattccatttaatcagggacttcagtggcagttattaatgcggttgcagaagtttactactgacgcacctcacgcgcgcggccgcgaaacgttatttgcttatttgggacatttaatcaaccatttggtgatcgattttgataatgagcagttggaagaacggatgaaacagttgggtaacatatggaatgagcaggcgatgcctttcctaaaacagcgtccttatctgctgcgtaactatttcctataccgtttacaccacgaccagtttgcaatgaaaggcgatcaacctctgctaaaaagcctgtatctcctggtggtcgattatttctttatcaagtcgttgatcagcgctcatttgattaaaattggcgatctgaccgaagaacatgtcatcgatattttctactcctatcacactttccgccagcatagcgccaaggccaccgccgattttatccatgaaatcgaccaagtcaaagtgaacgacgatttatctcttttgcaactgctggtgtagtcaaacgtgctgtggcgcaggtttaaattggcctgtgccaactattttatgcagaaatgttttgtcactcccgaactaaaaaagcgcataaggcaaatagccgcccttttctatgtctattccggcgattgtctgcgtgacctgacaggataatggtacgactctcttacccgtaggtgcctgtcatagtgagcgatctatataccgccgaaggcgtgatggataaaaattccctctggcaacgctacgttcctctggttcgccacgaggcactgcgtttgcaggttcgcctgcctgccagtgtagaactggatgacctgctgcaagctggtggcattgggctgcttaacgccgtcgaacgctacgatgcgctacagggaaccgcctttaccacctatgccgtgcaacgtattcgcggtgcaatgctggatgagctgcgtagccgcgattgggcaccgcgcagcgtacgccgcaatgcgcgcgaagtggcacaggctatgcgtcaggttgaacaaaaagtcgggcgaccggcgacggaacaagaggttgcccagattctggatatcaatctggatgaataccgccaaatcttattggataccaataatagccagctgttctcctacgatgagtggcgggaagagcatggcgaaagcgttgaacccgtattggaagggcatgatgatgccaatccgttgcagcacctgttggaagggaatctccgtcagcgcgtcattgaagcgatcgaggcattgcctgagcgcgagaaaatggtgctgacgctgtattaccaggaagagctgaacctgaaggaaatcggcgcagtgctagaggtgggggaatcccgcgtcagccagcttcatagccaggcgattaaacgcttacgtgcccgcctgaataacgactcttaattcacattcgctcaattttattttttgctttagcctaatttatgcaggtcttcttatgtctggacttaccttaaagaaaaggccgctgagccgctatctaaaagattataaacacacccaaacccactgctcgcactgtaataaacaattggaacgtatggcgttggttttccgcgggcaaattattaataaagaagccattgccggaatggatcaaccgattgacgatcaggtctgggttaatttacaaaatgagctgacggcgctgtgccgtttttgcagtgaaatatattgtaatagctcgccgggctattttgacattatggcattcaaacaatatttatttgaacaaactgagatgagtcacagtaccgttagggaatatgtggtgcgtctgcgtcgtttagatgaaatgctggtagccagtaattatccggcagagaaatttgccagtgagaccatgcatcagcgaattatcgatgatctgccaaatgcggcacataataattatcgcattgcattgcgaaaatacgatcaatatttggcctggcaaaaaaattactaaattttattcagctattgattgacgcccgacggtggaatattgcctcgtcgggcgttttgcatttatatactctaataatcgatttagccttcactaaaagtcagtgattaatcatctgacatctgataaatctatagaatcgttctatttcattccttttggaggatctgtgactcttcaacaaaaactggcgcaatttccgcgtctggatctggttgggcataccacgccattagaaaaactttcccgcttgtctgattatttgggtcgtgaaatttacatcaaacgagacgatgtcacgccggttgctctgggggggaataaactgcgcaaactggagtttttggctgcagaagccttacagcagggcgcggatacgctggtcacagcgggggccattcaatctaaccacgttcggcaaactgccgccgttgcagccaagctaggcttacattgcgtggcactgctggaaaatccgatgggaacgcaagcagaaaactatctgagcaatggtaaccgcctactattggacctatttaatgcggaagtggtgatgtgtgacgctttggtcgaccccaatgcgcagttggctgagctggcgactcgattggaggcgcagggatttcgtccttatgtggtgccggtgggtggctctaatgccttgggagccttgggttacattcagtgctcgctggagatagccgcgcagtcgcagggcaaagttaatttcagttcagtcgtagtggcatccggtagtgcaggaactcatgccggtctggcggtgggtttacaacagttattgccggaagtggagttgattggtgtgaccgtttcacgcaaagccgaagagcagcggccaaaagtggcgcaaattcagcgagacctggctctttccctcggtatttctagtgttgcggatatcaatctgtgggatgaatactttggcccgcagtacggtatccctaatgatgaaggcacggcggctgtgcagttattggcgcagcaggaaggggtgttactggacccggtttataccggtaaagccatggctgggctgatcgacgggctggcacaacagcgcttttgtgataacgggccaatattatttatccataccggtggcgcgccggcgttgtttgcctatcatcctcatatatgaggatcgatattatttattccattttcaactatagttatcaggttatattcctttatttgattcctaagactgataacgtagcgatatcaaaacgataaacatgacaatcggggtatctatgggcttttcaattgtacgtcgtcgagtggttctgggcatgatggcggtggcactggcaacgggcttgaacgtcaaatcctatgcggcaggcgatctgttggatcaggttaagcaacgtggaactctcattgtcgggctggaaggaacttatccgccgtttagcttccagggtgaagacggcaagctgaccggtttcgaagtggatttcgctaatgcattggcggaacacatgggggtgaaggccaaaatacagcctaccaaatgggacggtatgcttgcatcgctggaatctaaacggattgatgtcgctatcaaccaggtaactatttccgaagatcgtaagaaaaaatacgatttctcaacgccttatacaatttccggtattcaggttctggttaaaaagggcaacgaaggcaaattcaacaagccggaagatttgcagggtaagaaggtcggtgtcggtttgggcagtaactatgaacaatggttgcgagccaatctgaaaggcgtcgatattcgtacttatgatgatgacccaactaaatatcaggatctgcgtattggtcgtaccgatgccattctggttgaccgtttagccgcgctggatctggtgaagaaaaccggtgataccttggttgttgcgggtccggcttttgctcgtcaggagtctggcgtagcgctgcggaaaaataatccggagctattggcggcgatcaatcaagcaattgctgaaatgcaaaaagatggcactttggcgaaaatttcagagaaatattttggtgcggacgtaactaaataatgcaagaaagtattcaactggtgctggattcagcaccatttttactgaaaggtgcctggttaaccctccagcttagtctggggggaatgtttctgggattagcgctgggctttatgctggctatgatgcgtttgtcccattttttacctttttcactgttttcccgtttctacgtttcaatatttcgtggcacgccgttgatcgcccagttgtttatgatttattacggtttaccgcaattcaacattgaactggacccaatgccggctgcattgctcggtttatctctaaataccgccgcttatacctcggaaacgctaagggctgctatttcttctattgagaaagggcagtgggaagccgcggccagtatcggtatgacgcgctggcagaccctatatcgggtgattctgccgcaggccgggcgtacggcgctcccgccgttgggcaacagctttatcgggctggtaaaagatacttccctagcggcaacgattcaggtgccggagctgttccgtcaggcacagttagtgacttcgcgtacattggaagtctttaccatgtatctggccgcgtcgttgatttactggatgatggctacgttgttgtcggcgttacagaatcgactagaagcacatgttaatcgtcaggatcaggagtaacgatgagtaccattgaagtgaagaaattgaccaagcaatttaacggtcaacaggtactacgtggcatcgatctacaggtaaatactggcgaagtggtggcgattattgggccgagtggctcaggtaaaacgaccttgttgcgtagcattaatctgttggaaattcctgactctggcactattcgcgttggtgatattcagattgacggttctaaacctattagtaagcagcaaaaacaggtacgagcgctgcgtcagcaggtggggtttgtgttccagaacttcaatttattccctcatcgttccgtgttggaaaatatcattgaagggccggtgattgtgaaaggggaaaagcgcgaatccgcagagaaaagggcgcgcgagttgctggcaaaagtcgggttgagcggcaaggagaatgcctatccgcgccgtctttcgggtgggcagcagcagcgagtggcgatagcaagggctttggcgatgcagcctgaagtgattttattcgatgagccgacttcggcgttggatccagagctggtgggcgaggtattaaacaccattcgagctttagcggaagaacgacgcactatggtgatcgtgactcacgaaatgagttttgctcgcgatgtggctgacagggcgatctttatggatcacgggcagatcgtcgagcagggggtagcgaaggcgttgtttgcaaatccgcagcatgagcgtaccaagcagtttttagataagtttctgaataatagataatgtttgggggctggtttcgaaagcccagcagttcactgtctcctcacttaccgtggaggcttccgagccgggttggcagttgcccaaccctgcacccgggcttggcgcgaaagtggggttctgcgaacctccctcgggcgcgcttcgtccggcgagccagcgctagattcgcctgcgggcgttatcaggatgccatgccatcctggccctgcggctcaaggcgcgctttcaacagctgacggctgttcactcttggcctcatccctgctcggcccgcttcctgattgcgcctgttgagtgcaaaaccagtgttcttacgaatcacaatttgcctttcgtttttgatagggcttttgacattgagtttgatttttcagagcacatttgagcggctgagacgatgagtgagggaacccacgcagcgggcaggcgatacgtgcggaggcgcggattgttaaggctgtggaggtgagatattcaccaagataatatcaatcgaaaccggatgcgatctcaaactagctttagatgccgaacctaaaaaataaaaaggctcctaagagcctttccgtttatacataaaccaaccatcaaactatcagccgatagtcatcaaactggcgttgccaccggccgcggcggtattcacactgagggaatgctccactaacagacgctccagcagaatattggtttcaccgcgcgcgaagccctgtactgacacaatcgcgccgtcccgctgcgccacttgctcgcacagggtacgtagttgatcggcatcaccgtgataaatcactgcgtcaaataccgctttctcactttgccaatccggcgtcaaggccattcgactctggacggcagcaggcaagcgacggaataattccttctgaataccgctgtccggccatagtacctggctgccaaccgacagcactgccgccagctgaatcaaagcatcttgctcattatccgctagacacagcacccgctcacgcggcagcagcgcataggtattgcgctcaccggttggccccggtagcaggcgaatagttccgccctgagccaggtcactgtagcgttcagccaggctaacgagatcgtttcgcttctgttcattagcccagctaatcagtgcgcgatgagcggtcagcagggattcacgtgcggtgacgtcctgtggatgctcactgtcctgacgcgccaaggtcgacgttaccgcgtcttccggacgactacacagcagacgatacagatacagcggcccgccagctttcggccccgtgccggatagtccttctccgccaaatggttgcaccccaacgaccgcaccgaccatattacggttgacgtaaaggttgccgactttagcgcgatcggtgacgcgagcaatggtttcatcaattcgggtatgaatacccagcgttaagccataaccggaagcgttgatttgatccaccaacgcggtgagattctggcgctggaaacgcactacgtgcagtaccgggccaaagacttccttttgcaactcgtcaaagctttccaattcgatcagcgtcggtttgataaaggtgccgcgctgccactctttctcatcctgagtatccgcctgcgcggcctgatagactttgcgacctttggcacgcatcgcctgaatatggcgctcaataccggctttggcctctgcatcgataaccgggccgatgtccgtagacagacgctcaggattacccatacgacattccgccatagcgccacgcagcatttgcagcgtgtgctcagccacgtcctcctgaatacacagaatacgcagggcagagcagcgttggcccgcgctgtcgaaggcggaagcaaccacgtcggtaaccacctgttcggtcagggcggaagaatctacgatcatcgcgttcaaaccgccggtttctgcaattaacggcgttggacgaccctgaggatcgaggcgaccggcaatgctacgttgcagaatgctggcaacttcagtggagccggtgaacatcacgccgcgcactcgcgcatcattgaccagcaaggcaccaacgctgtcaccccgacccggcaacagctgcaatacaccctgcggaataccggcttccagtagaatacgcaccgcctgagcagcgaccaacggagtttgctccgccggttttgccagcacgctgttacctgcggccagggctgcggcaacctgtccggtgaaaatggccagagggaagttccacggactgatacaaaccaccggaccaagtgggcgatgactgtcattcgaaaaatcatcccgaaccattccggcgtaataatgcaggaaatctaccgcttcgcgtacttctgcgatggcgttgctgaaggttttaccggcttcgcgcaccagaatgcccatcaggttttgcatttgagcctccatcaactcggcggcgcgtaccaaaatggcggcgcgttcagtcggcggcgtggcaaaccagattgggccagcggctgcggcagcatccaatgcgcggctgacttcatcagtagtggcttcacggacataacccaccacatcactcggttctgccgggttgatgaccggttgttctacgccgccctgatctcgttcggcatcaataataggttctgcaagccaggcctgagtggcgctggttaatagtgcgctggatagtgaggccaggcgatgttcattggccagatccaaaccgctggagttggcgcgctcacttccgtacaaatcccgaggtaatggaatacgtggatgaggcaatcctagctgaccttcagcggcggccagcgcctctacagcggcaaccggatcggcgactagctcatctaatggcagcgttgcatcggcaatacggtttacaaacgaggtattagctccgttttccagcagacgacgcaccagataagccagcagcgtttcgtgggtgcctaccggtgcataaatgcggcacgggcgattgagcttaccatcggccacttttcctaccacttgttcgtacagcggctcgcccatgccgtgcaggcattggaattcatattgacccggataatagttattgcccgccaaatgatagattgcggacaaagtatgtgcgttatgagtggcgaactgaggataaatcaggtttggtacagccagcagtttacgggcgcaggcgagataagatacatcggtataaaccttgcgggtatacaccggatagccttccagaccctccacctgtgcgcgcttaatttcgctatcccagtaagcgcctttcaccaaacgaatcatcaggcggcgacggctacgctgcgccatatcaatcactgcatcaatggtgaatggacagcgtttttgataagcctgaatgacaaaaccgataccgttccaaccggctaactgcggctcgaaacacagtttttccagcagatcgagggagatctccagacgatccgcctcttcggcgtcgatattgataccaatatcatactgacgagcctgtaatgtcagggacagtaggcgagggtataactcatccatcacccgctcgtattgagcgcgactatagcgcgggtgcagggcagaaagtttgatggaaatacccggcccttcataaatcccacggccattagaggctttgccgatagcgtgaattgcctgctgataggaaatcagataagcctgcgcatcggcttcggtcagcgccgcttcacccaacatatcgtaagaataacggaaacctttatcttccaacttgcgggcgttggccagcgcttcggcgatggtttcaccggtgacaaattgctcgcccatcaggcgcatcgccatatccacgcctttgcggatcaatggttcgccgcctttaccgataatacggttcagagagctggagagtttagcttcattatgagtggagaccagacggccggtgaacagcaaaccccaggttgccgcgttaacaaacagtgacgggctgcggcccaaatgggaatgccagttaccgttgctaattttatcgcggatcagcgcatcacgagtcggtttatccggaatacgcagtagcgcttccgccagacacattagcgccaccccttcctgagaagaaagagagaattcctgcaacagaccttgcaccatgccggcgcggccattggcacttttctggttgcgcagcttctcggcaataccgtaggccagtttgtgggtcgcatcggccagatcggccggcaaacgcgcctgttccagcaacattgggatggcttcggtttccgggcggcgataggcggcggtgatggcggcacgggtgacagactgcggcagtatatgttctgcaaaatcaaggaatggttggtgggctgtttccaccgattgcggcataatgtcgtccttttcagcaggggaagccgttgccaacgctggaatttctggcatatcagcgccattttccaggcgttccagatagttaaatatggcctgcttaatcagccagtgcggtgtgcgatcaattcgttgtgctgccgttttaatacgatcgcgtgtcgcctcatcgagtttcacgcccattgttgtgctgcccatgccgtctggctcctgtcctaaattaagggagttatgttttttattcgtcacaatatctagcatgttgcaactttgtgcaaccatgttaaatcagggcaattaacgaactgtgaaattagtcggatttttaacattctttctgggcgcagttattactttgttttcattgggagggggttaacattactaaatacagggtttctacgggttttgctcagggtgcaactcactttagggtgcaaggtgaaaccgggaactattgtaaatgtgatgtagggtaaattttatgtaaattttttgttgaaagagttgttgctaaagaagagagtcctctaggatagtcagcgcgacaaattagtttcgatgataaatcatctcaggtgcaacctaatgctacgttccggcattcgcactgaactagacaccctgccatcgctggcgaggtgtttttaaactgatgtattaatgaaaaacggaagtattaaaacgtataaaacgcactatggagacgttgcatgatgatgaacacaccaatgctggtgacatttctcgtttatatatttggcatgataattattggccttatggcctaccgggcgacgaataactttgacgattacattttaggtggacgcagcttaggcagcgtagtgactgcactttctgccggtgcctctgatatgagcggctggctgttgatggggctacccggcgcgatttttctgtccggtatttccgaaagctggatcgctatcggcctgactttgggtgcctatctgaactggaaactggtggccggccgtttgcgcgtgcaaaccgaggccaacaataatgcgttaacgctgccggattatttcactagccgttttgaagataaaagcaaactgctgcgggtgatttctgccgtagtgattttggtgttcttcactatttactgtgcgtccgggattgtagctggtgcgctgttgtttgaaagcaccttcggcatgagttacagcaccgcgctgtgggccggtgccgccgcaaccatcgcctatacctttatcggcggcttcctcgccgtgagctggaccgataccgttcaggctaccctgatgatttttgctctgatattgacgccaattattgtcattctggccgtgggcggcatcgatacctcgattatggtgattaaagccaaggacgccgccaatctggatatgctgaaagggctgaatattgtcgcaatcctgtcgctgttgggctggggtctgggctactttggtcaaccgcatattttggctcgttttatggcggcagattcccatcacaccatccgtaaggcacgtcgtataagcatgacctggatgattttgtgtctggcgggcaccattgccgtgggtttcttcggtattgcttacttccagcaaaacccagagttggcgggacgtgtttccgaaaacggcgaacgtatctttatcgagttggcgatgttgctgtttaatccgtggattgccggtattctgctgtccgctattttggctgcggtcatgagtaccttaagctgccagctgctggtgtgttccagtgcgattacagaagatttgtataaagccttcctgcgtaaaaatgccagccagaaagaactggtatgggttggccgtatgatggtgttgttggttgcggttatcgctattgccatcgccgccgatccggaaaacaaagttctgggtctggtgagcaacgcttgggcaggtttcggcgcggctttcggccccgtggtattgatttccgtgatgtggtcacgcatgactcgtaacggtgcgctggccgggatgctggttggcgcaggaacagtgattatctggaataagttcgcgtggttcgggttatacgaaatcattccgggctttattttcgccagtatcgccattgtggttgtcagcctgttaggccgtgaaccctcgaaaattgtgaccgatcgtttccataaagccgaagcagaattcaaaaccatttaagcctttcgattcgctcactgtccgttcaggcaggcagtgagcgccttccttatttatctaacctccatgacacaatatttccccaaccagtccgctcttataaattcgtatccctgaaataatcagacatatttattggcaacaatccgaacgagttccttgaatttcccgatggcagaatgataatcactatcgttttaagttttactttttttatcgctggattgataatcaatatcgctagtgagttttacctttctttacttaaattgacgttacccaccatcaggggtgttaagcatgtttgtcccatttcttattatgtttcgcgaaggtcttgaagccgcgctgattgtcagcctgattgccagctacctgaaacgcacccaacgcggtcaatggatgggagccgtctgggccggcgttattgttgctgtagcgctctgtcttgggttgggtatctttattaatgaaaccaccggtgaattcccgcagaaacagcaagaactgtttgaaggtatagtggcggcggttgccgtttgcatattgacctatatggtgttctggatgcgcaaggtatccaaatcggtcaaggttcatttggaaggagctatcgatcacgccctaaactcgggtcgtcgtcagggctgggcgctggtggcaatggtattttttgccgtggcgcgtgaaggtctggaatcggtattctttttattagctgctttccagcaggacgtcggcattggtgcacctattggcgctattttagggttaacctgcgccattattgtcggtatggcaatttactggggcggcgtgaaattgcatctggccaaattctttaaatggaccagtctatttatcctctttgttgccgccggtttggctgccggagccattcgcgcattccatgaagcgggactttggaaccattttcaagatatcgccttcgatctgactaatgtgctgtcaacgcatagcctactgggtaccttcctggaaggtatattgggctatcaggaagcgccgagcgtcagtgaagttgccgtttactttatctatctgatcccagcattgattttctttttcctaccgcagcgcgaactggccgcatccggtgctcgatctgcgaataaaaccaaccattaatcttatttttaggtcagggagtcatgacatgtctaatcggttcttccgtcgtaccgcactgcacgccgcgctgttggcgttgcccgctttcgctatcagcgccggcgcgcaggctgctgatgctaaagttccgcaaataaaaattactgttaatgataaacagtgtgagccaatggcgctgaccattccggcgggaaaaactcagtttgtggtacacaatgccagccaaaaagggctggagtgggaaattctgaaaggcgtgatggttgttgaagaacgtgaaaacatcgcaccgggctttacgcaaaaaatgacggctaatctggaaccgggtgaatacgacatgacctgcgggctgctgagtaatccgaaaggcaaactgaccgtcaccgccaccgaaggtgcagtagcgactaaacctgacgctatggcgttagtcgggccgattgcggaatacaaagtgtatgtcacacaagaagttaatcagttggtgattcaaactaaagcctttaccgatgcagtgaaaaaaggtgatttagcgctggcacgccagctgtatgccccaactcgtcagcactacgagcggattgaacctattgccgagttgttctccgatctggacggcagcattgacgctcgcgaagatgatttcgagcagaaagccgccgatcctaacttcaccggtttccatcgtctggaaaaaatcctgttcggggataacaccaccaaaggggcggataaatttgccgagcgtttgtatcaggacacattagagctgcaaaaacgtattaaagatctgacatttgcgccgggtaaagtggcgggcggcgcggcagggctgattgaagaaatcgcggccagcaaaattagcggtgaagaagatcgctatagccgcaccgatttgtgggatttccaggcaaacgtagacggtgctcagaagatagtgaatttactgcgtccattgctggagaaagccgataaaccactattgcaaaaaattgatgccaatttcaaaaccgttgatacattgctggctaaatatcgaaccaaagacggcttcgaatcctatgaaaaactgactgacgctgaccgtaatgctatgaaaggccctattaccgcattggcggaagatttggcacagctgcgcggcgtgttgggtctggattgaggttgttaacatggtaatgaaaatcgacccattaaatgggccgtctcagccatcagatggggcggaatcgccttcgcgcagacgcttgttattgggcatgggcgtgatgagcggcgcattggcactggggacgaataaagcggctcaggcggcaacggcaggttctgacatgaccgctgaaaagaaagatgagcgttggcaaaaacagccgttttacggcacgcatcaggcagggattttaacgccgcagcaagcagccatgatgctggtggcctttgacgttttagccacgacacctgcggatctgacgcgtttatttaaactgttgacccaaagaattgcttttctcaccggcggcgggcgtgcgccggaagttgatcctaagctgccgccgctggactcgggaattatcgggccagaaatttatcccgacaatttgactatcaccgtgtcggtcggtaactcattgttcgatgaacgttttggtctgcaggcgaagaaaccgctgcatttgcagaaaatgacccgttttcctaacgattcactagatgcaagcctgtgtcacggtgatattctgctgcaaatctgcgctaataccaacgaaacggtgattcacgcgctgcgggatattatcaagcatacgccggatttacttagcgtgcgttggaaacgagaaggctttatttctgcccattctgcgcgcagtaaaggaaaggaaacgccgatcaatctgctgggcttcaaagacggtacggcaaatcccaaaaccagtgatgtacctttgatcagccgggtggtttgggtgccggacaatgtgggagagccagcctgggcggtgggcggcagctatcaggcagcgcgtattatccgctttaaggtggagttttgggatcgaacgcctttgcaggagcaacaaacgatttttggccgggataaacacagcggggcacctttgggtatggttcatgaacatgatgagccggattacgccaaagatccagacggtaaagttattccaatggatgctcatattcgcctggcgaatccacgtaccgtcgaaactcaggaaaacctgatgctacgccgtggttacagctattcattgggtgtatcaaactccggccagttggatatgggactgctgtttgtctgctatcagtccaatctggaaaaagcctttctggcggtgcaaaaacggctaaacggtgaagcgctggaagagtatgtcaaacctattggcggggggtatttttttagcctgccgggcgtacctgatgcgaatcattatctggctcagggtttgctggaatcgtaattattgtcggtcattgagtgtctgtatggctgcggtatctgatgatatcgcagctatttttttactgattgtaatgaatgttttgtaataacaatcaaacttaaatttttatcaacggctagattaatcggcatagattaaattattttttaatgattgtgagtgataaaaaataacaacccttccacctgtaagtctcccatcaaaacgaacatttgctttctgctcctcaattaacgggttgatttttttgtttttttatatttattttaaaataattctgtctgtgtcattggtatgggttatttatcaatggtatatgttttttatcttaaatgaaccaggtatcttcatatggtttttacgttatgtaaatatgtaacgttgtcaaaacacaaccttacataataggtcgttgttaatatttctaattactttaatttagaatggcagctgcgagattaagcatttagatatcatcacactaaacttatcaattatattaatggaggtatttatgaaacaaatgactagagaagaatctcacttagtttctggcgcaaacggtattacgatcaataattctacggttacaatcgcatttaatccgtacaacaatggtatgccaccttcagtgtcaacgcctgtcactccgattgataatccaggggttatgcctacactggatcctattcctgttgctactgaacctttccagcagggaactctcataccaacgccgatgagccttcagttttatcaaagatattaatgagtcaaacttgatgatattgtggttttaattatcaattggtattgcatctaagctaatattcattgatcacccttttatcattaacaatagagttagctacggtgcatttatggccgtggctatttatatagctgatggttattttttaatggacgctgcgatggtgatttttatacggttagaggcctaggggaataacaagtaagaaaatcaatgacgagtgatatgtcatttgggtatgactacgctgatctcgaggtggatttttttattacaaacgtagtaaatgatatggaaacattatcaactctttagagcataacgttatgaccagagaaagtatatttcggaaagaagtattggataatgggaaaacaaaatggaacggtaaggcgctgttaataaaaggcgtttcaccctggattgttttaaccgtatctgttgctattattcttatgcttgttacgttacttacttttggtgaatatacgagaaggattaatattgccggagagattattaccgaatctcacgctataaatctgttttcccctcaacagggatttattacgcaatccctggttagcgttgggcagaacgtaaaaaaagggcagcagatttatcaaattgatattagcagggtaacagattccggtaatgtgagcggtaaaaatatggcatccatagaaaaacaaattattgaactggataatcttattcgacgagtaaaagaaaataaattctcaattgagatgaatctggaaaaacagatagagcaaaattcacatgcttatcaggagtcacttaagctcattgaagcctctaagaaaggcgtggctgagatgcagcgtactttagataactatcaggaatatcaaaaaaaagggctcatcagcaaagatcagttggctaatcagcgagcaatattttatcagcagcaaaatgcctatcaaagtctatatcgtcaaagtatgcaggaaaatacccagctaacgaccctcctaactgaaaagaatattcgcttggctgattttgataatcagatttctcagtatcagtatcagcgtatcgaacttcagcggcagctcactttggctgaatcgagcggtatgttggttatcaatgcgcccatagacggaaaaatagaatcattgagcgtaacgccggggcaaatggttaatctcggcgacagtttggctcagttaaccccaaaggaaaagaagcaatatcgcctggtattatggatacctaccagtagcgccccctatgttaagcccggagacggaatcaatatccgttatgacgcttttccatttgaaaaatttggccagttttccggacatattatttctatttcagccgttcctgcatcctctcaagaaatgtccacttataacaatattcccaaaggagcgaatcgtaatataggaacggcctactacaagacgctagtcgcaatggatgaccaatcgcttttatatcagggacgacaattgcaactctccaacggtttaacggcgcaggcaacgatatttatggagaaaagaccattgtataaatggatgttttcaccgttctatgacatgaaaaaaagcgtaggtgggccgattcatggataaattaacggtgaaggatctttttagtcgcctggattttaattttcgtcggcgggtgcccagaataatacagacagaggccgctgaatgcggccttgcctgcctggccatggtctgtggatttcacggatttcatgtggatttgtttaatttacgtaagcaatacggaatatctctccaaggggcgaccttagctcacctagttgatattgccactgcgcttaagcttaaaacacgagcgctatcattagatatagaggaaattgatcagcttaaaaccccttgtgtcttacattgggatcttaatcattttgtcgtattggttacggttagggcatcttcggtagttattcacgatccggcaacaggaaggaaagtgatatcaaaaaacgagttttccaaacactttaccggtgtggcgttggaactgtggccagccagcgacttcagccagaaaacacaaaagagtcgtttaaaactggctgatctaataaagaatattcggggactaaaagggttcctgattaagattttttgcctgtctctgttgattgaatctattaatttattgataccagttggtacgcagctggttatcgaccatgtcataaacgctgaagattataatttactggcactaatctgtatggggttagtcttttttacgctgttccgcaccttcaccagcgtattcagatactggttttctatagtgttagattcgctggttgatgtgcagtggaaggccggtttattcgatcatttgatgactttaccgctgtcgttctttaaaaaacgcagcttgggtgatattcaatcgcgttttgattcattagcaacactgagagtgacgctaacaaccagcatagtcagcgcgattattgacgggattatggccgtcggattactcattatgatgattctctatggcggctggctggtctgggttgctctaggatttacttcaatctatattttgctgcgcttgttaacttattattattttcgccaggcgtcggaagaacaaattattaaagatgcgaaggccaaaacgcactttatggaaactttctacggcgtctctacgattaaggcactcggcctaacggccattcgcgctcagaattggctcaatctcagcattgaggctgtaaacgcaactattcatattactaaacttaatatgttgtttggtggggttaactcactgattggcatgttagagcagattattattctctggatcggtgcctctctggtaatggatgggaatatgacgttggggatgtattttgccttcaacactttccgcggacaatttgctgagcgggcatcgaatttgatcaatctggcgtttagcttgactatgttaacgttgcactgcgagcgcatttcggatattgctttgtctgagggggaggtattaaaacctactcggacctttatcaaacgcggtgaacccgcggagctgaaaattcgtaatttgtccttccaatacgatccattttccaaaccgttattctcagaactgacgctgacaattgccgctggcgaaagcgtggccttggttggaccatcagggattggaaaaacaacgctgatgaatattatttccggtctgttgattcccactaaaggggaggtattgattaatggggtggagataaacgcgttagggctgaataattatcgggattgtatagcctgcgtcttacaggaggacaaattattttccggttctatcgctgagaatattgccagttttgataaaaatatcgatatggaatgggtgattgcctgtgcccgatatgccaatattaatgacgatatcgacagcatgcctatgggctacgaaagtattatcagcgaattgggagggagtttgtcaggagggcaaaaacagcgcttgctgattgccagagctttgtaccgccgcccgagcattctatttttggacgaagccaccagccatctcgatctcattaacgaagcagcgattaacttgagtattgcttcactgaatattacgcgaattatgattgcccatagaccttcgacgattgcgtcggcacagcgagtcattcaactggatcaactatcttctgccgctttatagcgccagatagcgacgattgacagaaaaggagggcgccgcaaaaaacgtgcgatgcccatttgatattaactatttaatttagcggtgatttttgcgacatgctcaccctggaagcgggcaatggctaactcttcattgcttggctgacgtgaaccgtctccgccagcgatcgtggttgcgccatatggcgtaccaccgcgagtgtgcgagacatcaaacagttccggtgcaccgtagccgattggtacaataataaaaccgtggtgtgccaaggtcgtccaggtagatgagatggtgtgttcttgtcctccgccggtaccggttgaggcaaaaacgctggcaactttgccatataacgcgccggatgcccataaaccaccagtttggtcaaggaaagtgcgcatttgtcccgccatgttaccaaaacgggtaggcgtaccgaagatgattccatcgtagtccgctaattcctgcggcgtggcgactggcgccgactgattgattttcccacccgccttggcgaaggcttcggcaggcatggtttccggtacgcgttttaccatcacctctacgccatcaactctgcgaaccccttctgcgatggcctctgccagcgtttcgatatgtccgtacatagagtaataaagcactaaaattttcgccatctcgccgttctccaattttctataggatgatgttgatgaagggataatagtgagcacataagactcttattaaacatactccaataaggcacaggcgcaactgcatagaccggcgtatttttagctttaaatgtgatgatgcttaaagtgtgggatgatttaaggtttacgcaatttattttgtagtcgcttctgctgccagcggtccatccaattacccagaacaaaaatattgattgcctgaatggacaaagagataccgaatcctaatactacccacccgatccagtaatactgaggagaggtgaaccagttaatcacaaacaggaacaggcaaagtattagcgagcgaaacaatctgcggaagaagttcatctctttttcaacggccagacgcgcattttcaacacgctgatcgatagggtcagtcgcttccttattttctcctgcggtttcgccttgttcattaactaaatacagctcattcaccttcaattccataacagcggcaatagcgcttaaagtttcaaggctagcttgttcgccattttcaatacgttgtatggtacgaacgcttagggaggccatttctgccaactgttcttgtgaccaacctcgtgccagtctgagctctcgaacccgataaatggccatatctttcttcctgataataaggtgtgttctcccagcatagaacgatgcggaagatgtcaccacgacaagcacctgacactaggatgacagccataggacaccaacctgacagcgtaattatccgttgaatactcacataacgacacttgtttttacttatgacggtgacccagatcccaccttgttattgctctccgtaccgcatttatatatcggctatgcttggcgctaaggtttaattaaataggatatttatggactcaatattgtgccgcgacgcagatgggtgcctcacgatagtgcaagttgtggtaaatggatggctgattaaacgtttctttatcgatggagaagtctggggacctattgaggttaatagcgcggatgaaatggtgattctaggtgtgaaattttcagaacgaggctggttaagtattaagggaacaattcattcagaccctcaggtattacgtcgacaattatcctgtgggtgatcgtattagtttagacagcttgttactgtagtttcaatatgtgttagaagaaagaaagcatcgatagcagggaggggcagggagaataaaggtgagtagattactattaagcttatctatataaataacataataatcccagatgaagagagaaaagaaagcgtggttttggctgacccaataccacgcttttttatcacctttaaatggtctggcttatcagccaatcattccaacgggctatttattatcatacaaacgggttctgcgttttttcaggagagtgtaggacactgccagaataacaaaccacaacggcgtgacaattagcgcctggcgggtatcttcctgcaaagtcagtaacactaatacaaaggcaaagaacgccatacaaacccaagacataagaatacctgcaggcattttataaatggattttttgtgcagggcagggcgacgtttgcgatataccagataagaacacaaaatgatggtccaaacgaacataaacagaatcgcagatacggtggtgaccaacgtaaatactgtcataacgttaggaatcagataaataagaacgactccgcctaataggcaaatacatgaaaaggttaagccggaagccggaaccgagcggcgagataacaccccaaattgtttaggtgcatcgccttctttagccaaaccaaacagcatacggctggtggagaatacgccactgttggcggaagaggccgcagaggttagtacgacaaagttaatcacgctagctgctgcaggcaggccgactaagacaaacagctccacgaatggacttttatcagccaccacggaactccacggggtaaccgacataatcatgatcaaagaaaatacatagaacatgataatccgaatagggatagagttaattgcgcgaggtaagacgacttccggatctttggtttctgcggcagtggtgccaactagctcaattcccacgaaagcaaatacggcaatctggaacccagcaaagaaaccgctaattcctttcgggaacatgccgccatcattccacaggtggttgaacgaggccacggtgcctgacggagactggtagctcattaataccatggttaaaccggcaaaaatcaaagcgacgatagccacaatcttaatcatggcaaaccagaactccatttccccgaacatttttaccgtggcgagattcagagatagcagtaatagaacgactagcaaagaagcgatccactgtgagaagcctgggaaccaaaattgcgcataggcggtaattgccaccacatcggctataccggttattacccaacaaaaccaataggtccaaccggtaaagaaaccagcccacggacccagaaggtcggcggcaaaatcgctgaaagatttatatttcagattcgataacagcaattctcccatggctcgcatgacgaaaaacagcatgaagccgatgatcatgtagacgaaaatgattgatgggccagccagactgatggttttccccgatcccataaacagcccggtgccaatagcaccaccgatggcaattaactgaatatggcggttggaaaggtttctctggaggtgttcttctggctcttgttccgattttattgctatcttggattggtctaccatctttcccattccctcttcctgtgttgtgatgtttttttgagctctaaattggctctttggattatttactctgtctgtcgaactctgtcatttggggcatgcattaatgaagatagattacatttaatatactagtaacatttttcatacaatattctccatattgcatgatggctactgtttaaatttcactcagtgatatttgttaactgcatcacaataattagaattacaccatgttccctgacaactaacaataatcgcctgcgttactcgcttaattaatgagttgtcgccatatagagcatatgataggcaaaaaaatgggatgaagtgtttgacacccacagccaacaggagaataattctcgcgttgggtcgttagctcagttggtagagcagttgactcttaatcaattggtcgcaggttcgaaccctgcacgacccaccaacgaaatcaatcaattagaattagtctttaatttaaaatctattccacgggacatatttgggacccagtgattaaatattgagtctatttttctggcatgtttatttaaatgatttggtgaaagatttgcatatttcttaaccatttaaattgattcccatccgcccatttcttttaatgcagaaataggaactccagattagactagccagcttgctcacgtatgccttaaatcacgaaatctaaaattatttattcccgctctctcatgccgaataccaagctctgttacgatcaattctcaattctcaatttccttatttccggtgttagtgacccctcggatctatttgaagcatgaatgcgaacaaagatatatttatcaagcttccctatttgttccctacgaaattttgcgacagtgtcatttagggcttagccaatagtctttctgatttgctatcttccaggttcatccaggcaaccttcctttgcatatctatctgttgccagtcccggttgattatattggagcggcctaggtcggtagaaagagctaagcgaacttcagacttcagtggctctgggcatttatttattcatctgattgcctcatagggttcaagccaacggatgcgtttgttctttggtcgagggactttgtttgaacagtcctgccttagctagccatctccactctctcggcggttctcattatcgactccattaatgaaagatgagcagcctccgccgctaaggtttttatctgtgtcgacagatcgcttctctgatttctcgtcaatccagagtaaacaggcctcttcgaacatgatttcaggcatttcgcttcgatttctttggcgtggattatggctcttacatcatgggttacttcaacaccacgtcatggagttcagacttcgctacttgctccggtgaatggaaggttgcggattcggtcactttcgttgatgactcggcaattacagtcaccagtgtaactatgatcccggcaacgagtagcggtgtagcgggttcgactgttcaattaacaccgaacgtctccccaactgctgcgacaaataaaactggcgtatggacaagctgctatgcgaccaaagcagcggttagctcaagtggcctagtcactcgcgttgccgttggcacagcgataatcacattcaccacgaatgatggcgctaaaactgcctcaagcaatatcactatcactgcgtaaatatcacaaagagcatctattggtactctttgtgatatttatttcaaagctgaacgatttaaacgaacaacatcgcgatattgatctacattaccaattatacccttatctttattactactatcgttaattgtggaaataagaagggcaatagatccataaaaaataaaatgaagattgggcttctggtattgtgtatttcatctctgtttcaaattacagcaaatgcgaatgattcaatatcaagtcgcaaattttccgcagttaatcgagcgaaatattgaaatatttccttcctgtgcttgggcgcacgataaagaaggatatgtgatgattgcttatgacattaacgtagccggaagggttgagaatgcaaagattgttgaggttgaacctaagaatctcttcgagaaatcagccttggactctatctacaaatggaagtatgagcctaataagccaaccagtggaatgggcgtcacaataaactataagaggccaaagtgaggctgtaagtatggggaccgatccgccaagagcaggtttgcgcattctagcgctcacggtcaatgaaaaagacgtgaccgcactatgagttagcggccacatttgagcaagtgcctatgtggaatagtggtcagagcttcactattttactgacgttaatctcacgccctcttgccgttgatttatttttcaccttgtctttggcaatagataaggcaacgctttcgctttcagcttcgaccgtctcagacgtagtcgcggtatttttaccaccaccttgggagtactgaattaagtcgaaatgcactctataccttgccatgtgggttcctttttaatttaagtcctaattttcaagctaatagacttcatttattcatgttttaaaacatatctagtcgttaaccagaatacagggttattactgatttaataacctgatatttcaacagtagttgcttttagggtgacatataaatggttaatttatatgcaatatgcctgcagaatttattatcgagagtattgacgctggtgttggcgtgatgattgacctgttcgaggtcgatttacagttatttggcggcgatgtgattcgctctcactcgggaactcattgctactatacgatgctatctggaaaggtcctcaatattcagcctatccaatcgtagttgaaggggggcgaagttaagtcaaaagggacatactcgtagctttcccaattaacagaagattggtcagacgatgcttttcgctctgaaatgaagatttttcacttataccttggttaaactgctgattcaacgagaaagcaaagatcacatggttaatgtaaacagaagttatacttcataattgtaaatggttattattgttatttgtgttttaaacggttatacgcgtccaatataagaaggctaaatgcaacttattttgtttaaattacggtttaataagtttgagccatggagggagagaatgactcaaacggataaaaaaatatgcactcaaatggctttaatggataatggcataaatttattttcaggtcggaatccaaccggttaaggctaagtgctttgatatataagataaaaaacagatgataaacacaataaaaaggcgagggatagagtgatgcagatgaaagtcacggaaaacgactgacggtacagtttacggattaataaagacgtcatagttggaatctcaacgttactgcagcgtgaatttaatccatagggtattgtttctttatgtgattaatccatatctacattattaatgattataggatggttacctttttggcattcatgttttcctgcctatttgaattaatttcgtcctttctgtgaacttaatcacacttatttatttgttacaaaaataacaaactaggtaataccttcactctttatcaaactaagccatactgaaaaacaacttgattttactgcggagctattctctttatgaagaacccgacgcttattcaatttttccattggtattccccaggaggaggtcaactttggcaagaggttagtgataaagcctcgcaactgagagagataggaataacaatagtctggcttccgcctgcgtataaaggtgcgtctggtggttattcagtgggctatgacacatatgatttatttgatttaggcgagtttgagcaaaaagggaatcgtgcgacaaaatatggtgatagagaggcattacaggctgcagttgagcgtttgcaagaatgcgagattcaggttctgtatgatgtggtattcaatcacaaaatgggggcggacgagaaagaaccggtaagagtatcgaatgttgaagagaataaccgtaatcaaattgctgacgaaataatagacgctcaagcttatatacgctttacgtttcccgcccgctcaggccagtattctcaatttatttgggatcagacttgttttagcgggatagattctattgaagacccatcggctaatggcatattcaagattattaatgattatggtaatgatggttggaacgatcaggtcgatgacgagttaggtaatttcgattacctgatgggggctaatatagagtttcgtaaccctgccgtggtggaggaattaaagtactggggacgttggctattggactcattaccctgtaatggtttccgtctggatgcggttaaacatattcctgcatggttctataaagagtggatagatcatgttcgggatcatgctcagcatgaccttttggttattgcagaatactggtcgcctgatattggtaaacttcagaaatatctcgagcaggtggaaggtaaacttatgttgtttgatgtggcgttacaacataagtttcatcaagcttcaaagtctggtgatagtttcgatctcgctcaaatatttgccaatacattggtggataccaatcctatgaatgcggttacgctggtggctaatcacgacacccaaccgcttcagtccctcgagtccccggtcgaaccctggtttaaacctctggcatatgcattaattttattaagggagcagggggttccttgtatttttcaccctgatctttatggtgctagttatcaggatgaaggcgacgacggggaggtgtatcaaatagatatgccgataattccagaattggagccgcttattcaggcgaggcagaaatttgctcacggcgcgcagacggaatattttgatgataataactgtattgcatttgtgcgttcaggcaatgaaaaccaacccggctgtattgttatcatgactaacggtgctgaagctgagaaaaatatttttttaggtgaagatttcaaacatcttcgattcggcgattttttaggtaatcgaaaagatatcgttattattgatgagcaggggcatggggtgtttagggttaatggtggcagtgtaagtctgtgggtacaggaagagttcctgtgagctcagaggcgttacatatgcagttaagtttgttagtagctgactaataattaagtaaatgtaatgtttatgttttcctatttgtttttattttgcccttttgtactgaaaaattactatttttagtgcttcatactttatacctatttgtgattagcttcagaaactgaaaggttataaggtaatggtatcgcttatttgtgtgataaatcgacgagttaacaaagggagtaacaaatgcgatttgaaaacaaagtggtcgttattaccggtggtggtaatgggatgggggaagctgccgcccgtcgtttctcttctgaaggtgcaattgtggtactagctgactggaatcaggacgccgctgaatcagttgcgcgctctttgccagaaggtaaagcattagcatatccaatcgatgtctctgaccatgtagccgttaaaaagatgatggacagtattgctgaaaaattcggtagaattgatgtgttactgaataatgcgggtgttcatgttgcgggtagcgttctggaaacaacggttgaagattggcgccgtattgccggagtggatattgacggggtcgtgttctgctctaaatttgcacttccttatttattgaaaaccaaaggaagtattgttaatacggcatctgtctcaggtctaggtggtgactggggtgcggcgtattactgtgctgccaaaggtgctgtcgtcaacctgactcgtgcaatggcattagatcacggtggtgatggcgtccgtattaactcggtatgcccgagtttagtaaaaacaaatatgaccaacggttggccacaagaaatccgtgataagttcaacgaacgtatcgcattaggccgcgcagctgagccagaagaagtggccgcggtgatggcgttccttgccagcgatgatgctagcttcatcaacggagcaaacattccggttgatggtggtgcgactgcatcagacggtcagcccaaaattgtctgattaaacgttcaagcgttttactctgtttacctagtctgagctgagtccgaaagtatggcgattcagctctgatggcattcctttcatcaataaaattatctctccatctacctatctgcctaagcctttcgttgctgtcttccctgtttttaacttatttttgaggtgtttcctgcgtgattctgatttttactgctaatcttttttaatcattaagctaaaaaacatcgttaaaatcgaaaaattgcaataacaagaatcaactaattcctcaaaataggggaggttacatgactcttggtattaaattttgcattttatttatttgtgtaggtttaattactatcaaatagcgcctttattagcttcatattcttatatcttttttgaataatttatgacatttaactcttggtcatccctacgtaagttaacagctacattatgagccaaggtgtacaacgatgatttttgtcattttatggtttgttattgccggattaagtgagtttttagtttggggccgccctttacttatggcgctgttatcactgatattcttagctgtagggggactatggatttataaggtgagaaagatacaggttaatactttgttaccgtcagaaggaaaaacaaagcgtatcagtaacctaaacctgatcttttccgtaggtattctggctattcatgcgattacgcttttattgtttggctaattcaatcaatgttttgtttaatttctgttcgatcatatctttaagctatttgttgatatcggttgtcatgaatatgactaattatgccaatagttccagccgagtatccgcatccatgcagctaaactccaacagattacagctgagttcagtgctagggaaaggcctgagtggtcgagaaagaagttaaagggaaatcaggtagataagatacggaattaccgcccaccttccgtaggtgatagtgagacgtaaagcttcgattgaacgtttgctacccacaatattatattgtgcgatcggagcaaaggttggaaacagcggaattaacccggcaatttagtagtttcacgttttgaataacagagcaataagaatcacgactactgcgcctaacaatgctttgattaacagactcataccaatagatgggatcagcatggtaacagtttacttgttgataattaataaattgtaactaacagacccaatgggtatttgggtctgtatcagacgcgcgtaatgttattggcggaaggcgtgtttgatttgtgcaatggtattttcgaacacttctgcctgggttttgtcttctatcagaggtaaggatctttccatcttcagaataactttacctgcgtctgcctggccaattgccttgagcatcaatgtcagcgtggttttcaggcatgtaacttcgtgagctaaagtctcaagatcggcggcagtagtgaagtctgtgttactcatagtgtctcctaatggacattgttgccgcgtggcttatcctcatattggcgtgccattgaggttaaaagcagcattttttacagttacctcattatatcacagcgtaatgaataactctgcgcacggtaattatttgttaggatacacacagatactgaatactctctacggaattcggataattctcaactgagccacataatgaatttttatgctaaataactaagaacttgtgcgtttacttaattaagttcataaagtttacggttagccatatgtttaaataatgacgatagaagactaattcaggttttttaatgtggtaatcctgtaactgtggcagagttggcatgctaggaattattcttatatgatgaatgtttgtgcagaaagtaattattcataacagtatcaggtggttgtcttttttaaattagaaaaataacttgttgtaaactatttattgcactaataattagttatttgagtagattgtgttgtaaaattcatcacttattttgggatgtattttcctttcgttgaccgctccctttaataggccgacttgccaaactaatggcggatgaaaagcgatcgcgataaaaataattctgaccaaaatagagatgtaaaattacaattattctgtattcattctttggctgaaaacaagtaatatcactgccgtaaacaaagagtgattaggttactcccttatttttttggagaattttctttgattagcgttcttcttgttgatgaccacgaactggtgcgcgcagggatacgacgcattctggaagatatcaggggtatcaaagtttcgggtgaagcgcagtgtggcgaggatgcggtaaaatggtgtcgcaataatactgttgatatcgttttgatggatatgaatatgcctggtattggtgggttggaagccacgcggaaaattctccgtttctccccagatatcaaagtcatcatgttaaccattcatacggagaatccgttaccggccaaggtgatgcaggcaggcgcaggaggatatctgagcaaaggcgctgcgccgcaagatgtgatcaatgcgattcgggccgttcattcgggtcagcgttacattgcttctgatatcgcgcaacagatggcattgagccagctagagccgcaggttgatacaccttttgcctgtctttccgagcgcgaattgcaaatcatgctaatgataactaaaggtcaaaaggtgaatgaaatctcggagcaacttcatctcagtcctaaaacagtgaatagctatcgttaccggatgtttagtaaactaaatataagtggtgatgttgaattgacccatttggcgattcgccacggtctgtttaacgcggagacattgtcaaatagtgactgaatgctttgatgcaaaagagtttttgaaaacagtaaccagccagcccggcgtctatcgtatgtatgatgccaagggtactgttatctatgttggtaaagcgaaagatttgaaaaagcgacttaccagctatttccgcacgcaggtaaatagccgcaaaaccgaaacattagttaagaacatcgctcaaattgatgtcactgttacgcatacagaaactgaggcgctgttgcttgaacataattacatcaagctttaccaacctagatataatgtgttgctgcgggatgacaaatcatacccacttatttttctcagcgcagatactcatcctcgccttgctacgtatcgcggagccaaacatgagaagggcgaatattttgggcctttccccaattcctatgctgtgcgcgaaacgctagctttgttacaaaaactttttccgattcgacagtgtgaaaacagcgtttaccgcaatcgctcccgtccttgcttacagtatcagattggtcgttgcctgggaccttgcgtgagtgggttagtcagcgatgaagaatatcaacgtcaggttgattacgttaggctatttctttccggtaaagatcaacaagtactaactcaattgatttctcgcatggaaaatgccagccaattgctgcattttgaagaggcggctcgtattcgggatcaaattcaggctgttcgacgagtcacagaaaaacagtttgtttccgggaatagcgaagatctggatgtgattggtgtcgcctttgactcggggttagcgtgtgtgcacgttctgtttattcggcaaggtaaagtgctgggaagccgcagttactttcctaaagtgccgaatggtactgagctgagcgaggtggtgcagactttcgttggtcagttttatttacagggcagtcaggcgcgaaccttaccaggggagattttgcttgattttgcattggtagaaaaagatctactggctgaatccttaagcgaacttgcgggacgaaaaattcagattcaaagccgaccgcgaggtgatagagcgcgttatcttaaactagcgcggaccaatgcggcgacggcgttagtcaccaagctatcgcaacagtcaactatccaccagcgaatgaaagcattggcggaaacgttgaagttgaatgagataaaccgcatggagtgctttgacattagccataccatgggggagcagacggttgcctcatgcgttgttttcgatgcgaatgggccggtgaagtcagagtatcggcgctacaatattaccggaattactccgggtgatgattacgcggcaatgaatcaggtgttaaaacgtcgttacggcaaagcaatagatgagcaaaaagttcccgatgttatttttatcgacggcggaaaaggccagttgggtcaggctattgaggttttttccgaactggatgtgccttggaacaaacaaaaacctttattaataggtgtagctaaagggagtgaccgtaaggctgggttggaaacgctattctttgccgcagaaggtgaggggatatcgctaccttctgattcgccagcgctgcatttgatccagcatattcgtgatgaatcgcataatcatgcaatcacgggccaccgacagagaagatcaaaagtaaaaaataccagtgcattagagctgatagaaggcgttggtccgaaacggcggcaaatactgttgaagtatatgggcggacttcaaccgttacttaacgccagcgtcgaggaaattgcaaaagtgccaagtatttcacaagcattggcagaaaagatctacaatgcattgaaacactgagcgtaatattgcaccatactcattatatccttactcgccagatagctatagaagcattatgcaattgaatataccgacttggctcaccctgtttcgtgttgcacttatcccattctttgttctggcattttacctgccattcgtttgggccccggtgttgtgtgctggcatttttgtattcgcagcagcaaccgattggttcgatggatttttagctcgccgctggaagcaaacgacccgttttggtgcgtttcttgatccagtagcggataaagtgatggttgccgtagcattggtgctggttgccgaatattatcaccaatggtggattactttaccggcagccaccatgatcgctcgtgagatcattatttcctcgctacgcgagtggatggcagaaatcggcaagcgtagcagcgttgcggtgtcctggattggtaaagtcaaaacgacggcgcaaatgatgtcattggttggtttattatggcgtccaacggcttacgtagagttggctagttttgttctactttatatcgctgcggtgctgactttctggtcaatgttccaatatttaagcgcagcctggaaagatttgctcgaaccttgatcgaagtgccgcaaaaatcagcaaacggacgttttagattgataattttattgactcattgcgtcaggtaagtagaatgcatcgcatcagacggcagcaacgaaacgccgaaagatagcaaaaaaatcagtaagttctgatgttgcgggaatagctcagttggtagagcacgaccttgccaaggtcggggtcgcgagttcgagtctcgtttcccgctccaaatttggcaggcttgcagaaatgctagtctcagcagtaaggcaatgaagaatacggcgcgttggcagagtggccatgctacggattgcaaatccgtctacctcggttcgactccgggacgcgcctccaattttcctgagcccgggtggtgaaatcggtagacacaagggatttaaaatccctcggcttatggctgtgcgggttcaagtcccgccccgggcaccatggaaaatagtataagtaaaacaaagcagtatgagtatgtcgttaaccgccgagaggcggtttttttgtttctggcgtctgccgaatttggcgaagtggcgaccaaatgactacattgtgtctacgacctttttgcccccgtttaaagccctgccaaatcagcatcagcttgcgctggataaaattctcctagaactgaattgcttcggacatctttcttgcaaccaaaggcgctgatataaccgatggcacgtcactgcgggcaaatggtcgccagtgcggtggcaatctccaaattatccagcctcggtacgcccggaatacgcggccggacgccggtcacgatctgggcggctaacagggctttcatgccggtatagcggccattctcgtctgacctgccgataatattgggagtgatttcggccgcatcgttgccggtagtcacgcgtaccacaatgttgaccagcttggtctgctcggcaatggctaacagtgatggcgccagcgtatcttttttcctggttttccccggcggcggccaatacatcggtgatcagtatcggggtattgaggggaaaggtcttagcgtcggcggtgccgaccatgccaacaatagcggtggatacggtggaaataacccgtgtgccttcgttaatttcgaggacacggacgccttggtgataatcattcatacagtcaatttttgtgaatggaggggtgaacctatggtgacgaatttgtgggtgggggtaccagatgagggatgtgtgagctgtggcacaataaaaagcgcggaatacattccaggataaaattaaagctgtatcagtctatggtgatttgtactaccttatttctgacgttactacgactctatttctgcttgtttgggactcttttcatgctcagtatttttcatgattattcgggcgctattgttaattctgcccttggtgtcttatttacatttatttttagcttctttttgagacgacgtaatgatttaagttggcaaaaatttgaggacagctcctgggataaaagaatgctcgccatctcaaaattcggtgagctttattttaaaccgaggggggattttaatagacttgaagtccagtatttatcaaagtttctgacacatagagcggaagaaaattactgttttgctgttttacagtatgtgtccctaagaaaggatctaagtgttgatgcgacattaaaggtagccagagaacactctggcttagttgatatatgccctgatggttcagcgaggatgaataagaagaaagtattgatgagtcttcttcttttaacattattctccatttccatgggatattgggttcctgtgagagctatatcccttctcgacgacgtgatgaagacatcctctaaaaatgatttattggtcgtcatccgatattgttcatggttattttccgtatacgctatttatgtggtcattaggcaattaaaagcattgcatgaatttagaaagttgattgagaaaataaacttaacaatattattaggtaagttgaaaagggcatctgcgtcttaaaaaagagtgggtaatccccacatattgatacttattgtgagggtttaaaagcgccatgtgattagatataacctatggaacacatggtttttctccggttaagcgttcaggcgctatgatgccggattgttgagcacggaacaggtgatgggcgttgtgcggaggatggcacaaacatctgagggggagagcagtaacgccgcaaaaatattattgcggcattaaaatatcaggtcaatttattgactatttttcagtaaccgaatcgttttatcttcgatgacaaatcgcttttcaaatgcagcaccaatcataacaccgccccaagcatggctgactaactcattgaccaattcgcattcagtaatcaatggcctgaaaacttcggtacttacttccagatgtttaatccctgtgcctttcttggagttggtaggtttaaagcctgtccccgttgaaaagtcattatcttctggagaagaccaaccaataaaccaagttccatgaatgatttcgtttctacgttcaatcaggttagtcacccgattattgattttagctaatatgtttttctgttcctcatttagctctgcgctaaccataagaacggaatgaaaagcctttgatagtggataagctgtcagctcagccgtaagggcatgggtgatttgttggttctgcaacccgtggcgcccggatagcgctacaatacctgttctcatagcaaaacaaactaattcaaacttggctgtaaattcgcccaccaaagcatattgctcctgggtttgtgctaaccttctggcttcccgctcttgatctgacatcagtctctataccatttatttaaatcatttattcgcacagaaacgattgaatttctggcaaccgtgccaaacaatataaacgttattacagtgctagcacatgctcatctggtgtttattcagattgtttggtgccccaacccatatcgccaaacctcattagacagcgtagccatatccgccagtacgctggtgacggtctccgtcttcaacgtttacagcagaaccagactgtcatttttatcattactatgagccacttacagaattctctcgacaggctgcgccgctgttttcagtcgtgagatcaatcgccgtcagcgtcacgcggggttcccagcgcatgactgcgccatacaccgccgccatcattttgagccgtaaggcggggttctgcggctgatcaatcagcgtggacagcagcgaaccgtattcccgacgcatcactctggagccttgcggcgtgattaaaatatcgctgatagactggcgaatgtgagccatatcggtaatggctttacctgtctgcgcattcatgccgagataagtcattgcggccccccggaggaatcaccgccacctttgacgccgccgtgttgatgggtgtgaaccacaatgccgtttgaggtcagattgccaccggaatggttaaagttgcctcgcgcctcaccgccttcttcaatcagaagggttcgggtaatcaggtgttgagtacatttcaccactggcgtggtgagggtgatcgaggtttcggccacgatattggcggttttcatgccggtaatggctaaatgacgggttgtaggttcatattcaaatctggccccatcgggaaatgtcactacgatggcatccgctgaagccgagggtgcagggttgctatcggaaaacaccgcgggcaacacaaaagcggtggtgagttcgccgccgatactgaggataatcacctgttcccccaccgagggcgcagcccaaaagcgcacccgaccggcgcggggcgtcagccagttcaaccagtcggtttctagctcgcccatttttacccgacataaacctttgaccgtatccacttcggatacaatgccgatgcggatcagattcgccagggcgcgtttaagtgctgcaataagcgttttcattcagccagtgtgccgcgtgcgggcgcgactggcatgtgataggggttgtgtgagggatggcacaaagaattaactgcaaaaagaataaacgcgtgtattaaaggttaatcaaaatgtgaacaatatgggggttcggtaatacatcaggtgcatctaatgactaaaccctgtaacctccctacgttttattattttaactattccgctttggtacaacaactacactcatgtatttgttaacttcacgaatgaatagatcaatagcaatgcaccctaaattaaaagcgtctttgggcatttttcggggtgcggcgataaactccatattgaccgcaggtgcattggcaagccactcagcttatgcctccagagagctgagagaacaaaacccaagattatattggcgtttacgttctatgggcgaactggacatattgtattttttaattaaagattcagtgtctggctatgtggaggccagcggtatgcaagagcagggacgagatgatgaatacaggaggataatagataatgtcatcaaccaactcaacggttaaaaaaatcttagtcggttttctatattatctttcttatatggcggcaaataccgttgctatgatcgcaatagtattgatggttacatcatttttctattttgaacattggtatgtcgccatattagcttgcgtgggtatttttgcggtttaccactttatattgtatttattcccgcaaagaccagattaataactacttcgcaatatgccccaacgccagaccccaatccactctacatcgccgtcggttagccctagcaactggcggcgttcatattttaccgtcggcccgttgcggctgattttatcccgcaggccgtagtgatggactctgacagatgtttggtacaatgtgcgcgcaatgctatgggcggtataaatatgattatctcagcctggttggagtgtcattaaaagtggatctgcatactaagaacgacaattccggggagaataacgccgccttctacgccaaaagagtcattaaaatcatattggagggcgtgataaatatagggtgcaaagcctactccaacggcgtcctttatatttttataaatcccctcatcgccacaatgactgaattgagaaaagaaaaactctcctgcatatgcatacccgcctttgaaggtccaatgatccttttcccaccagtcttttcgcacgcctagcaacatacatctgttggaaaaactattgactaacgttccaacagataaactgtaatctgactgggcatttaactttctctcaacggcaatatactgattatcaaagtattgcgtatagtcagttttgggttcatatgcatgaaatataaatgcccccggattcaccgagtaaagtttgtcatttgatgcgatagcactggctgaaatagcgatcaaatcggtggcgatagcagctctcattatttgtacctacatgtgttcgtgtcgtcacgctccgcgatggcttgtttgtcgaagcccaagcttgaaacggtgtacagttcgaacttaatcgtagcagcctgcttttgttccggcgttaatgatggatagataaacgatttcaatttttgcctgttaaccaaatagggattttttatttaaagagaacggtgatttacagttcgcctattcggtctgcttattcagataaagttgcccggctttctgatgttttccatgtggttaacaagatgccttcggccatcaatcaagaatgcgatgaacataatgatgagcttgttacctgaatttgctgaggtttttatgcacgccagagttgttacaacataggaatctgatttttgttgaaaaataccctcagcgttttatttacaccgcattgacttttcccgggctggtgttaacactttagtgatgcttatgaagtaaactcacttatttaaacgaatatcaaaatcaaaggtaaaaaatgaaatacatgacattagttttggctgtgaccgtcctgttttctgcttcatcctatgctgccaaacagatcactcgtcaagagtctgctggttatacaaaaataggggagctgtcctttaagcagtcaggtataccaaccgtaggtcataaagagctttcaaaaaaggttaatcaaaaatgtgaggaaatgggtaatgtgaaagccgataattgctattacttcattttggataaaaccggcaacgaatcaaaccatgaaaacgttgatgtcgaaattttcaaaaaataacgtttaaggctctccttagctctgcatcatattcatacctgatacagggtttgaattatgtcgaatgaagaacgtatccgtattgtgaggtgaggattggcatgataaagaacccggcattcttgttatcgctatccattggctttttatgttcagcacaggcctcagcaaaagttattgtcgaagaaggtctgagcctgtatagccatacggctatgatgactatgagtctacagctgcacgccttacggatattgcggctcggaatggcttgtgggtgaatgttttattggtgcagccccttggttccatggtcctggtgattttcacggccacgtagataaccggtttgatccccacaatggctatcatggcgcattccctaagcgcggagatgcacctttccatcacttcagagggaacgaggttcgcaatagccgtgttgaatatcgccgctcgtagcagaaaatcttttctcgggttatttatcgtacttttagcttaaggaaataccaatgaataaatttatcttttgtgtttttctctgcgcactttctggatgttccggcgatgatcgatcggaatggggcaaggcacccgctgagcctttggatgcgcaaacttgcatggatgatatcagcgatgccaatagcgattgcgcgcattctgtcgatccaaaattcaattaatatgaatgcgttcagataataattaattaaagagagacctgtgtctctcttagtctaccaaataaaatcaatctgcttttaattgtgtctgtgtcaatgccattgttgaagtcgtgcgtttatattcaattattgatttattcaggttaggaggggcagctttaggtattgatgcttactgggctattttcaggaatcaagtaagtataagggaaaaggcggtcatcgttctttctattaattttatcagtgatccctgatagttattttcgaaaacctgtcaggtatgggtaaataatcgggttatcttttctggtgaaaatttcttccccttaccaatcaatatactctcccaaatagccatgatgaagctactccgaatagggtgtaaatttcaacctttccttaatgatagaagagatcaatctggtcgcgaggaaactgtatctttcttgcggttttcgctttatcggaaaactcgaaaaagataaatattgtgatttcctgagtctcaataacgattgagcaacggtggttccgacaaacatatccttcttctgtgatgctctctgaacatgtcttattttagtgtcttggcgctgtgtattttctcaagaaccgaaaggggaattctatcgcttcagtggcagatagcagcgggcttcaagccattatctacgcaattattgctgccggcgaacgctagccaggggataatccagcgggaataacttggatgaaacttaacatattcgcaaatttgatgtgttttactgagaatccagatcgataggcaaaagtgacagtcatcagcgtatagcaatgaggttcaaggcattcaaagggacttgagctcactcgttgtaacctgtttctctctgggatttaaaacaaaaaacccttacacgaggtaagggttgccaaatggccaacaccagggaaagttaagatgattttattgattataaggctattgaatcatattaatgtgattcatgtcacgcatttattgataacttaaataaattcaatacattaatttgaagattaataattatacttaagtcaaattggctgtattcattatttaatttaatgtttatattgttttaatataaatagtaaatcatcgaaaatttgtcagatgccgcttattttcttcgcatcatccctgaaaaaatggttgggataggtcttatccttatcggcatctttaacgttctgagatgtcacaaaaaccccgatacaccgtgattcttgtgacaatcggtctttaaggtttgtcatcgtcagttaacgaagaatattatttagtgtttttattcaataggttatagggattgcaacaatgagggatacgagggtttatactctgtgggttgttttactttcttatcacctttcgccgagcgaagcagagtcatttatccccgccgctctcaactgaaagtggtattggccgattctccaaaagattgtgccaaagcggccatgacggacatcggcattattggcgtggtaaaaatttggtgtaatgccgaacgttgcattggttgcggtgcctgtgtgacgtactggattcctccctaaatttagcttcatgctgaaatgagggagggctccatttcatttttttagacttcatgttaagaaaatggattaaaaacgggcgcttaacccaatgttatacataaattgctcgccgctgctcaggccggtggtctgcgatatggaggcaaacgaggccacgttatccgtgagcggcacgttggcaccaagagtgagattcacccagttcttatcctgtctggcgctgtcgcggacaaaatgagtttgagttgatttcaggcccccaccgcttcgataaacgtcatccccaaactgatgttggtaattcacttcggcataagggttaaataaggaaaatttgccatccagccgccagcccaaagatccaatttgcgaatgataagtttgatcgctgaagcgcatggccgtactgtcgttaccattttcgctatatcccgacacattgctgtaatccagcgcaaattgcgccatcgggccagtggtcaggtaagtggtgatcggaatattatatccggtagtgaatctggctccccactgtttgccatcggtattaccggtttcagttcgggttaatgtgccgatctgcatactgcgacgtatatcatcgtaattcatgctggcgtagtgtacgtcggcattcatccaggcataatccgcgaattccagagcgctgaaggctgaaagcagcaaaccacgcgccttataatcgtaacggctggaaggccgttgattatcattcgatcccgcaattaatgcgccaatcagccaattttcggtcaactgataatctatacccaaggtcagattatgagtagtggcattgccatctccggcggcaatgttggctgaataatcataatgctgcccggcataaccgccaaatacgccaaatgagtcctgcggatttttatgagtgcgcaattgctggaaacggctgtccagggtagctcgagtgtcgcgagccatcgccgccgtggcttgtgtcagcgcagcggcttgcgcgggggcatcaagtaccgcttgcatataatcggctatcatctgatgcgcctgcgggcttgggtgaaaatgatcggagaaaaggtaggattggcccggggcaaagccagcctgacccgaagtacaaaccgctgaagaaacgcctatcgggcagggcattactgccgtattggtaaacccgaacagattcggattactaataatttcaccgaatagtttattcacatcgacgcggacaatattgccgctaccttgggcgagcaaagcgtcctcactattattataaaaatctgtgagttgcccggccagagcgctttgatcatcaaaggcagctatgagctgaacggcaatcccttgctgtacttgcggaatagagctgattcgttcagaggcggcggtgagtgcctgatgaatagcctgtctgcgggaggggttatcaggcgtagtcagggcatttagcgtgctgaaagcggcctgtagagcgccgggtattgctgaaggctgtacggcagccaatccctgttgaataaccagttccattaacattggggtagcgccgatattgggcacggtcggaacgataaccgtattggctccggcattgagtaaagcctgtacctgcgttgcggcagcggcagcgctgttatacgccacgctgggtgcgctggccgggtttgaggccgccgcagcggccaaatcgttaccgcctacccaatgcagatacaggccgttactgtcggcctgaccgttcactcgctgcaagtaactttgtacttgattctgcgtattgtaggcggggttgagtgctggcaccgcaacggcgccgccagcggcgtagttaaacccgcctttatccgacgcgactaatgtcatacctgcatttttcgccaaaatctcgtcgtataaataatgctggttgctatcgtaggtgaatctgccgttatttccggtatcactcagactgtcgccgaaaacataaacattgtcgtaagcgaatgtagggccagtggcgcaaaaaaataaagcaatggccagtgcatccatgcgatacggatacattattttgataggcatatatcaactcccttgaacctaaatatgaaagaggaaactcttgatggtcgttccggatgtaacaatcgctacctaaatattgtcggtttcctgatttagtcaaggcgaccggatatattcctgcctgcaggcccatgaatcaaaattgaattatggtcagtaagctgccacgaactgggttttggctacgctgaaaatataagcaggcataataaagggggaaactggcaaagtagaacaaacctcaatataatcgtttaattaattcactataaatatattaagggggattgctatgttgactcgtgaattgtttcttttttcacccgtcctcagtcatcgcaactgctcaagcgttaccggtatcgtgctgcgataaccagcttgagcgaagctaactgacaatctgaaaacttccctccggcttactgcattgcgagtgcgtccgacggctgaggcttcggtactgttccaaacagcgtttgcaagaatggcacgatctagcaccggtttacgatattttgaccgacaaacctgcgccagccgctacggctccggttgagacaaaactggaaagcattgcgcagcaggaaactgaagaagaatacttactggcgatgttgctgggtctggaaagcaaacttgaaggcgatctggcgcgtaaacccaagcatcaaaaaccagagttacagcgccagtggcagcatgaaattgtgcagttaagtagacagctaggtttggtttaaacggtaagatgagtattcaggccgtagaaatgcggcccgtttatcgggtatagaatttgagattaatagcatggcgcatttggttttattgaggtgataatcgctgaccagtaaatattatctttaaaccaataggaaaaaacactaaataaacagcctctgaaaataatctcttcgtatatcggaacaataaatatcagtaataacggatttatgattgaaatatacccacgatgtgaaacttgatccgtcatccacttttctgattttgttactcccagcagataaggtctaacgaactgaatggcaagtatgacgagcagcaatatcagaaaaaggcgataaaagatttccttttccaaagccgtcacgttttctaaagaaaaactaatatgaaggaacgataatgctgagctctaataggtacattatagggagcagcagcccttgtctcagcaattcctgactgtgtgcgatgaacaaagggatacaggtgatacccaacatcaagaagaacatcgagaagtagcctgaaactgccttggttttttcagtaaactcattatcggccatgcaatacccctatattctgttcgacgaatgagtctctacgcacttcacgtcacagtgtcttttgagttgaacgtagcctttgattgaaatccgatacgcataatccgaagagtcagatgcaggtggtttgtaaaatctgcctttcgttaggaaaggcagggagttctcttttaacgtctctttaattcccgcattttctgcctttagcggaaaacacggctacggtgccatgtaattgcacgtccacctgtttgaaatgtgtggagagcaccgagtgtaaattatctaacgaatcctgataattactaaaaattcctttttggttatagaccgacatcagtttgcgggcaaaggcattatgttccacaccttcaccaagaattgttgcaccacaaacaacaccatcgtcctttattgccgacgcggcgagtgcaatagcgggcgctttctctgacatattaccgggcaggcaatgaagcagataaaataaagaaaccgagtcgaactgattattcagatgctcaggtaacggttgaaaaacatcatgcaacacgcattctgaaatacgatgcagtccgacgcgatttttagacgcttcaagactgtttgggttgaggtccaacagagtaatattctgtgagcctcggggcgtattggccaggtaataaccggttccgacgccaatatccaagtgtttttttcccatgtgttgctgtaaatgaggtaataaaatatctttggtactgcaacgccaggcgtatttattcgatatgtttagtacccaccaatcatagagtttcagtgacagtggtgtataaacctgagcacctttagcgtttttggcattcatccgtaaatccttttcttatgtttttattcaacaatcaattgctaaaataaccaatttttatcttggaattcaatatacaggtgttaaatttccacattctcttattaggtagttagggggattaaaacaggataaagagggttgcattagatttatgaatggaaatcgggcggccttacttaaacgcgcttaggggaaatttgttaagggcgcacgcagatgcgataagggatacctgagttaattaaaccgcccctatcgataacgatgattcactagcgaacgcaccaattttccttacacttcaatcgcacttagatgttactctttattcagttaaagcgatgggagctggcaagtgaaaaagtcaccgtttacgctattagttgcactttgtgccgttagcgtatttttcttaatcggcgggtgtgagaaaagaaactcctattacttgatgcgataaagaatgacacccgagttcaaatattaaactgcgataaatattcggatgaaaacggtgatgcgccagccacgcaaaaatacagcgtagagaaaagcttattcgggcaaactcccttgatttccggcagtgaaattacctgcgaattaggtaaggatgtttcagaaaaacagctggcacgcgttatggcgatcgagaatggtgtgattaacggcattgactatacgcttttccattctgatgcctcagggagcgttgggcagaataacgctgaatggcaggtggtgtgtgaaaaagatgcaatgacagatgcacaaattgtgcagcgttgtgcagcgccgaaaaccacgatttatatctttataagaatgacttgggttatttggtttccgtggaaaaaccggctatagcaattcggggcctgatactcaggctcgacgccgaaaatccattgttcactaatactgaccagtttgatgcaaaacagtcgaggacaattatttctgctctgcgtaatggcacaaaattagtttatcgatttaaaaaacgcccaggtgatatctctgaggatgtttacgtcaacaccaataatattgagcaagcgttgctgttgctgaataaagcctatgctgctttgtgacgggcgagctaatcatttgattcgggccgtgtgaatacgcggccttttttatatggggtgtctgacatttatttactgagtgctaaacgaattaacgggtaaggtcgcccctgactgtctaattcagagtggccggtgatttggaaacccaaacgcggataaaaccttctgcccgcgtattttgcgcattcacgtcggtcgttattattgaatatagcgccacggcgtaatcaattattttacgaccaacgccgactccccgatatttcggatcgataaataaaacttccagctgaaattagttaaatagcataaatccgatagacccatcttggttatcgacccaagtaacaagggggcagcgggaagcagtgtagccgcgttttgccgttgaacgagagcttcaatctggtgcatgacaggcgctgccttttcccacttcacagttaaccattactgctcggtgcgctcatcatgctggaaaatgcgttagcccagcgatgcgtatttttcttgaaagtagacatcaggacttacccgcgacgctatgcgccaatgccgaacggctagcggtggctggttaggcgagtttattttttgttattttatgagcggctttagcgttatttccccgaatccatacattatacattcttctgaattcaggccgcttcccgctaaattatcttttgtgagcgaaggtgagtctgaatcaggtcgccccgcgttaagaattctactattttctctttttattgatgaaattcctatagtttttctatgaaaatcagcatttcgtatttcagactcgttgcaggttaatgtgcggtatcagccatttctttacttatcccaataattttgtacggatttttcgcaattcctttcgtagctgctattttattttttataaatcaataaattaaacttatttcgcaaagctaaaaaatgatggttttgggaggttcatcacaatgcgaacccgaagaagtgtgaagaatgtcaatctgaaaggtcaatgagagacgattaccccaaatagtggattactgccttatctggcaactccgtatactttcgacaaccagagacaatggatgtgggctaaggctcgcgatgacgtacagataaagggaattttaccattgcaactggcatatcaataacttgtgtcttttgaacatcaaaaggtgttgggtatggaaaagaaaaaaatttatctgttttgttctgccggtatgtccacctcgctgctggtatccaaaatgaaggcgcaagcggagaagtatgaagttccggtggtgattaacgcctatccggaagcgctggcatcagaaaaaggcccagaggccgatgtgatcttgttagggccacaaatcagctacatgttgggtgaaatcgaaaaaatgttcccgcacaaacccgttgaagttatcgacgcgcagctctacggcaaagtcgatggtttaggggtattaaaagctgccgtggccgctataaaaaaagcaaaacaataataggggattgtcgtgagccaatttattgcttctctggaaaaagtcatcttaccctttgccgttagaataggcagacaacagcatatcaacgccatcaagaatgggtttatcaggctgatgccgttaaccctgaccggggcgatgtttgttctgatcaacaacgtattcttaagtttcggcgacggctcgttcttctactcaatgggggtgcgtttagacgccgataccataaccatgctgaatggttggaaaggcattggcggtaacgtttataacggtacccttggtatcatgtcgttaatgacgccgttctttatcagtatggcgctggccgaagagaaaaaggtcgatcctctggccgctgcgctgctggcggttgcagcctttatgaccgttacgccgtacagcgtgggtgaagcctatgccgttggcgcaaactggctgggcggtgccaatatcatttccggtattattatcgggctggtggtagctgaactctttacctttatcattcgtcgtaactgggttatcagcctgccagacagcgtgcctacctcggtttcgcgctcattctctgcagttattcctggttttatcatcctgtctatcatgggtgtgattgcatatttcctcgcccaatatggcaccaacttccatcaggtgattatcgatagtatctcggcgccgctgtctaaaatgggcaatgtagtcggctgggtgtacgtcatgttctcctccctgctgtggttcttcggggtgcacggcgccatggcgctgtccgcgctggaaagcggcattatgatgccgttcgcactggaaaacgttgcaacctatacccaatacggttcggtagatgccgcgctggctgcgggtaaagagttccatatgtgggccaaacctttcgtcgattcctacattttcctcggcggaaccggtgcgactctgggtctgattattgccatttttattgcttcccgtcgtgaagattaccgccaggttgcgaaactggcagctccagcaagtattttccagatcaatgaaccaatcttgttcggtctgccggtcattatgaacccactgctgtttatcccgttcatcatgattcagccgatattggcgattattacttccgtggcttattacagcggttttatcccgccaatcaccaacattgcgccatggacaatgcctgccggtttaggtgccttcttcaataccaacggcagcattgcggcgttactgctcagtttgtttaacctgggggtagcgacattggtttatctgccgttcgtgattattgctaacaaggcgcagggcgagattgaccgtgaagttgaaagcgaagaagaaatcgcaaacagcctgaaattctaataattacactttgtttgagctgcactctgtttatgacgtaaaggtttgggagctggaatgaaatatcaattttccgatgatttttggtggggaagtgccacctcggcaacgcagtccgaaggggcggcgttacgggagggtaaaagcaagaatatcttcgattactggtatgagatttccccggagcgttttcatgacttagttggtccagaaaatacttcgacattttacgataactataagcaggatattttgttgttaaaggcgctggggcataacacgttcagaacgtctatttcctggtcccgattgatccccgacggtgacggcgagctgaatcctcaggccgtcgccttttataacggggtgatagatactttactggcaaacggcattaagccttttattaacctctaccactttgacatgccgttatgcctgcaagagcgaggggggtgggaaaaccgagtcgtagtggaggcttatgcccgttatgccgaagcctgttttaagttgtttggcgatagagttaaacactggtttaccttcaatgagcctattgtgccggttgaagccggttatctgaatgacttgcattacccttgcgtggtggattttaagcgagcggtgacggtggcttaccatagcgtattggctcatgccaaagcggtggggcgctaccgcagcgcggagcaaaacgggacaattggcatcattttgaatctgagcccgacttatccgcgttcagatagcgccgaagatcgtgcggcggcgtatcatgccgatctgttgcttaatcgcagtttcctcgatccagtaacgaaaggcgcttatcctgctgatttggtggaattattacgccagcatgatttattgcctcgcactgagccggaagacgctcagctgattgcctgtggaacggtggatgtgcttggggtgaattattaccagccgaggcgtatccaggctaaagacgttccggtttctgccgggcaggtaaaaaccccagaagatttatttagtttttatgcgatgccgggtcgtaagattaatccccatcgcggctgggaaatttatgaaaaagggctgtatgacattctgaaagacctacaggaaaattacggcaatattccctgctatatttcagagaatggaatgggcgtggagggcgaggagcagtttatggactcgaccggaatgattaatgatgactaccgaattgattttattcgcgaacatttaacctggctgcataaagctctacaggaaggtagcaattgtaaaggctaccatttgtggacctttatcgactgttggtcgtggcttaatgcctataagaatcgttatggattggttcggctgaatagggcagaccaaacccgtgaactgaaaaaaagtggttattggtttgcaaatgtcgcaaggcaaaacggctttaactgacggagtaatatcatgtttgatttagattctatcgttgataatgaagaaaccagcagtgagttggaagacgtcgttatggggctgattatcaacgcgggtcaggcgcgcagcctggcttacaaagcgttaaagctggctaaaaccggtgactttgctcaggctgaagaaatgatggctcagtcccgattggcacttaatgaggcgcatttggtgcagacccaactgattgaagcagatcagggcgaagggaaaaccaaagtcacgctcgtactggttcacgctcaggatcatttaatgaatgctatgctggccagagagttaattgccgaattgatcgaattacaccaacgagttggttgatgttgatgttggcactttgtccgttttgaatattaaaatgacggtgaataaaatggatataagattagtacgtgaaaaagatctttttaacgacaaggaattccatctatttatttacaataaaacggaaagtgccacaggtttacatcggcatgattattatgaatatacgctgatattgacgggaatgtgttatcaggaaattaacggtaaacgggtgtttttagagcgcggagacgtggtttttatccccgtagggtctcaccatcaaagtttttatgagtttggcgtgactcgcattctcaacgttggtatcagcaaagcgtttttcgagcagcattataaacatattttatcccgcagttttgtggcttctcaggcctatcgtattaaaggcgattttctttcctatatcgaatcagcgatttctgcggctcacgtacaggaagatgaaataacggagttgttggaattactgacattctatgtcacaaaccgcattagccattataaagagaccgctcccagcgatgatattccccagtggctaaaaaataccgttgataagatgcatgataattcgcagtttggggaaagggcgctgatcaatatggtcgaactttctggcaaaactcaggaatatctcactcgcgcgacccgacgttattaccaaaaaacgcccatgcaaattatcaatgaaattagaatcaattttgccaaaacccagcttgaagtgactaatgacttggtttccgatatcgcttttgaagcgggttacagcgacaccacattatttatcaaaaacttcaagaagctcacctcttttacgccgggtaactatcgtaagaaattctatggcgttgctgagagtttatcccactaatttttggctgacgctggcgacagcgggctacgcagaaaggtattactcatggggaagttacttattattaatgctgatgatttcgggctaagcaaagggcagagctacggtattatcgaagcttttcgccacggagtcgtttcttctaccacggcaatggtgaacggcacagcaattgatcacgctgcggaattgagtcgggaaaatcctgatttaccggtggggttacattttgtcctcacttacggccgcccactcactgagatgccttctttagttgatgccaagggcgaactgaataaatctctgtggcagcacgcggaggccggcacgttgaatctggatgaaattgccggagagctagttagccaatttgataagttcgttgctctatttggccgcccgccaagccatatcgacagccatcatcacgttcatatgttgccgcagatttatccacgggttgccgcttttgcccgcgagcgaaatctatcgctgcgtattgaccgtcattatgcgcagcagcaaaaaatcgcgttgggtgattctcgcagcagccagtggtttgaggacggtttctatggtgaggaaatatcggaacagctatttttacaattgttggataaagccaatgagagaggcgtgaattccgttgagtttatgtgtcatccggcctttatagataaaatcctaatgaccagtagctattgttatccgcgtttaactgaattagaagtattaacctctcccacactaaaacaagccattgcgcagcgcggttaccgattaggttcttttcaggattgctaacgttcgcctatttatctgataaacatcctagtaaaacggcccaaccagggccgtttagttgagaataaataactctcaaaggcttcctggtacttcagatgttcttattcattatgcttcagctgcgactcactttattgagtaatttatggcaaccgcttttttccattttaatgatatgggtagcatcggtggtggcatcttcatagcttttacgtaattcctccagatcacagccactcggatgattgccattgctggaagaaacttgaaagggaagtatattctggttgcttaacatggttgctcccgtgttgacactcaggacgcacagcagaggcaatatgatgaattttgaatttctcaacattgatcttccctacggagtttcttaatcatgggtctcagaccatactctctgaagattgtattagtgagagtaaaggtaaatatgattaagctgagggtaataaattatagatttttcctctgaaacggcttaattattgacaatataagatatagtcaagtgcgtgactttctccgcgggcacagatacatgctctagcgctaaaagcattgtgctataaagtatccgatgccagataataggaatatttctatggcaaatagcagaatcatcaggatattgatgttcgccgtagccattttgaatcgttcaaaaaaaatactatacatggtgatgaatctttaaattggaaacgctattaatcttgctaagcataagcttatcctgatagacgcagcgtctatcgctaccgatttcagacgtgatatttccttcggcataaacttgtttcagcaacgctgggtaggccgtaatcagccgcgatgtatttaacatggctgaaagtctggacgatagctctctggcgatattgattgccggatgaactgcttctgaattttgctgcgtgagttccgctaatcctccgcgtaaaaaccagtagtgaagttcggtgctattacgaaatttaagcttagccattgccgtacgtttatgattgctcacggttttaacactaatacgtaacatattggctatactgcaatttgtcatgcccagcgctaatgactctaagacttcgcgctcgcggcgggtcaatgcttccgtaatgggtttaatgccgataagagcattccgggactgtattgaggaaaacattggctttatcaaattcactaatttatcaactgataaattacgtgaaatgactctaatattttcctgattgatagtgagtgagtgatgattaacgctatccggattttggatcaaaaagaaccgagtgttagaggtctccgggttagcggcaatctccgataataatcctgactctgatagtgaacttccacaaaaaatgatgttggcacgataacggtagtaaatgtcgttagtaaaaaatacacgtatatttaatcgggagaaaaaaacaataagcacctgacgtaaaccttccgcatagtacttatctttctcgataatcaatattgtcagggagttattcccagaaaatcgattgtttctcgtggcgtgattattaatgacgctggattccatgcgtagtctatcctatgtggcaataatatttattattatttttctgaaggttgtatttattttattttctgctgtaaaacaaaaatatcaaatatcgctcaaataagtttaatttttcaatcgtcagtcatcatatttcaattatgttctcatttcttttcaatcattattgatctctcgagtgcggctattatgagctgtcatgggttttattataaatcttcatttttcatagggaaaagcaagaaaccttttataaatccttaagttatttaggaaagtccactcgaatatgaaacataatattaaaggaatttttattccactaacatcgcgctttgcgatgccggttgcttggttaaatattgtcatacagattctttttcctctggcgggtgcatttacgccagtcatggctgcaaaagcagataatcgctcgatgctaaccccgccctcggagaaaaatgtaatacctttaactaaggtatatacgttagctaagggggaaactccatcaagcgtggcaaaaaagtatggtattagcctggatgagttacgccagctaaaccgccatcgactctttttacaggagtttgataaattgcctgaaggaacattgttgaatgtgccgaataaaattccggcaaaaacaactgaaaccaatataggagagttgaataaacaacagattgaaaaggaaaataaatttgccagttgggcttcgcaatctggccgctttcttcaaaataatcctaatggcgatgcagcggcaaatcttgcgttaggtgcagcaaccagcaaagctaaccaagaagtgcagcaatggttaagtcgttttggtaccgcgcgcgtacagctaaatctggataaaagtttttctttgcaaaactcacagattgatttgcttattccactaaaagatcgaaaagacacgctgtggtttagtcagagtagtttgcatcgtactgatagccggactcaggccaatttggggctgggaattcgctattttcagcctagctacatggtgggtacaaatagctttctggattatgacttatcccgcgatcatgctcgcttaggctggggggtggaatattggcgcgatttcctaaagttaggtgccaatacgtattggcgcctaactaactggaaagattctaaagattttgtcgattacgaagaacgtccggcaaacggttgggatatacgcgccgaaggatatttacctgcttacccgcagctgggcgctaaattaacctatgaacaatattacggcgatgaggtcggattatttggcaaagataaacgccagagcaaccctcatgctattaccgctggcgttaattacacgccgtttcctttattaacccttagcacggaacaacgtcagggtaaatccggcgaaaatgatacccgatttggaatccaactaacctatcagccaggaataccctggagtcagcaattggacggcgcggcagtggccgttcgtcgtagtctggctggaagccgctatgaccttattgaacgtaacaataatattgttctggaatatcgcaaaaaagacgtggtgttcctcacgttgactaataacgccagcggctatgccggtgaacaaaaatcactgggcgtatccgtgaatgcaaaatacggattggatcgtattgaatgggacagcgccgcgctggtgatgaacggcggcagccttgttcaagaggccgccgatagattcagcgtgatattaccgaattatcaacccggtggacgcgccgcgaatacctataatttaagcgccgttgcttacgataaaaaaggaaacgcttcatcccgcgcgcaaactgagattgtggtgacggaagccgccgtcagcaccttaaacagcacctttagtccagcagaaagtcagctaactgccgatgggcagcagactgtcgatctcgtgttgaatattcgcgataaagataatcagccagttgatgtgcaagatactgagatcaatctggatattagcagtcaggcgagaagtaaagtcagcactcaggttacgccatttactcgcgtggatgtggggcaatatcgcgcaacggtgacggcaggaactcaaaccgagcgagtcatcttaacgccttcgacgcgcaatataacattggctgaggccaaggttacgctggtggccggggatgcggatatcggacattccactttgacggtatcacctgaaacaattgtggctgacggttctactcacagcacgctgacctttaccgctaaagatagccatgacaatttggttagcggcttaaccgatgtgagttttgctatcagtgggctgaatgataatagcagcctggtggtaggcaaagtggcagagagccacggggtttatcgcgcaacattgcagggaaccgaagcgggcgcggccagtttgacaccggtcattaacggtgtggcgctcggtggattggcggcgttgctcacacttaccgccgataacggaacggcgcagattaccgatggcaatttgtgggtgacctccgacggcgcgttggcaaatgatattgaaaccaatggtgttagcgtcagagttaccgatgcatcgggtaatgtagtaccaaatcacgaggtcacgtttagcaccagtaacgggcagatccttacgccgcatgtcataactgatgtgaatggattggcatcgacgctgctgaccagcactctctctgggactattcctgtcaccgcgacggtcaacgggcaatcgaaatctgtcgatacccagtttgtcggtgatctatcgacctcttttattaccgaccttacgccatcggtgacgcaggccgtggctgatggcagcacgaaggtgatatatcgagcgacggtaaaagatgaaaaggggaatactttacctaacgtaccggtgtattgggagcgcgacaatactcaggttatgttgagtgccgctcgcagtgaaaccgatgatcagggcatcgcgcaaattgaggcttccagtctgaaagcgggggaggtgattgtcagtgctcaaagtcggctttctcgtaaatcggcaacctcggtttcctttatcgccgatatgactcaggccaagatcgatcggcttagcgcggataaaaatatcttagtggcagataatacggaaaccgccaccttgacggtcggcatcactgacaagaatgacaatattctgactggtgtaccggtgagctggcagattattgaaggcagcggcacgatcattcccgttgagtcagttaccgatacgcaagggctggcgaccgcctctctaaatacccgtcagtctggcgtattaaaagcgagcgtaagtctgaataatggtgattcgcgcaatattacgctgaatgctgtggccgataaccgcacggcaaaagtgttattgacggcggaaaataacaaagactcggccattgcgaatgacgtcgattctgttgtgctgcttgccgaggttaaagatgccgaaggtaacgccattattgatttgccagtcacctggcgcagttcgattaattcagtaaatcaatccgtgtccaacaccgatatcacgggtgttgcgcggatgacgctaaaaggcaaccaggccggagatgcgcaggtaacggcgctactgttcaatggcgaacaggcggataaaagcgtcaggtttgaccctacagcggcagaaattgggaacagccaattgagcacatcgccacaaactatcgttgcagatggcgttgccaagtcgctggccacattgatattgcgtgataccaacggtaatccggtatcggggcaaagtgtgagattcagcgcggaaaacggttccgatatttctttcgtcaatcaactcgaaaaaggtcagggtgtttatcaggtcgaggtgataggaacgcgtcagggaacgcatactttaacggctcatatcgatggagcaaatccatttaacaagagtattgatctggggctggttgccaatgcttcagatgtacggattaagtcggtaaccgttgctcgttcgcaggccaatgctgacggcaacgattcagtggaaataacggctcaggttgaagacagccaccaaaataccgcgctggaaaacgtggcggtaggctggaaaaccaatctgggagaattaatacggccggttagccagactaataaacaaggggttgcagtgatttcgctgaccagtaccgaagccggaaatgcgcaaattgccgggctattaggttacggtcaggaagaaaatgccgacaaactggttacatttgtgaccggaatggtatccgatgacaaatcaaccttctcgttgtcaccgacggtcattactgccaatggtaacgatagcgccacgctgctggtgactgcgcgggatgctcaggggaatttgttaactggattgcagaaagagatcgtgctttcttctccggagggcatcaccttaaagacctcggcatttactgaggtttccaccggaatttatgaaggaaaaatcagcgggactaaagcaggggttgccaccctaaacgttgcgatcaaaggggttacccttaagcagcagcgccaattaacgctacgggcggatgcggctacggcgaagatgttgggtagcgcaacggcgaccccagcgtccgctatggtgggcgagtcggttatttatcgggcgactttagtcgatgcctatgataacccgctgggggcgggtattccggtgacctggcgtgctaacgccgacagctacttgagccagcagcaaaccctgactaatgcccaagggataaccgaggtgtcgctcagtcgcaccaaggtgggtacggcgcaactgagcctaatattgaccggtggaacctttgatgcgccgaatgtgcctttccacgcaggcgcggttgatgaaagtaaatccgagttgtctctcagtccgggcagcattaccgccgatggcgtagatattgcgacgctgaaggtgatactgcgtgataaacaaggcaatttgctgtcactgcaaaaagtatcggcggaggcggatcagaaagacgcggtgacgatctctgcggctaaggaaaattcaccaggtgaatatctgatcctggttcagggaaaaaaggcgaccaccgtcagtttatccactcaggtcaatgacgctccgttcaaaactgcgcagacgctaacgcttaaggctgatatttccagtggaaaggtcgatagtattacgccggccgtcaccagcattgttgcagggaaggacagcgtcgtttatcgcgcggtgattagcgatgctgagggtaatttactgaaggacgctattgtgtcctggcaattaatctcaggttcggcggtctttgatcgaatatccagaacggatgggatgggagtagcacaaactaccttgagcagcaccgtagcgggtgacgtggttattgcagcttatctgaacagtaaccaatataagaatgctataccggtaacggtgaaacccggcgccatcgatcaaaacgcgtcgacctttgtcagtgacaaaatcacaataggctcggatggaaccgaagcggccaatttgctggttaagctgaaggatatttacgggaataatattcctaaagaggtggttaatattacctcatcttctacattgaccggttttaaggtgacgcctcagccaatgaaggatataggcagcggtaattacaccgcggctgctacctctaccgccaaaggtcagcaggtgatcagtgccaaagtgggcagcacccaaattggcaaagatattacgattaccatcggggcaataacgccggatttgcgttttgataatgcgcagcagcaagtgacctatgtcaaaacctttaaccaatcgcagccggccagaaatgttcccgtcggcgtgcgccaattttggagcagtagcgatcctgatgtggcgcaggtagatgacgttggcaaagtgaccctatataaatcgggcaaggtcactatcacgattcaaaccagcggtaatgggcaatataacccggctcagggcagctatgaacttcaggtagataaagccgatcctcagctcacgacggatcaggcaattattgccgattactgggcggaaggtaacaatccatcggtgaaggtttcactcaataatagtgatgctgccgccttaaccccaacttatcgaagtagcgatagcaaagtagtgaccatcaatgctcaaggtaatctgacgcaagtcagacccggagcgactgatattaccgtttcaacgccggaaaccgatcaattcaaagggagtgaattaaagattggctataccttaagtaaagggcggcatcctattaccttcagccaaccgactttccaggtaacggatcaggagaatctgtcggtagagcagcctattgtggcactacccgctaatgctaaatatagttggggaagcagcgatagttccgtcgttaatattaaacctactactggggagataaatagtcaggctgtcggcaaggctcggttgacgttaaccatggcatcgaatgaattctacgaggaaagtagcggctattacgatgtggagatctacggaaaaccgagtattagcggcaaggtagttcacctgagtaaaggtcagtcatctgaatcgaataaatggaatccgacgtttacccgcgatacgatatcggtgaactggtcatccgagagcagtaataaatacacggcgccaacgaaggtggtaattcagatatttgataacagtaccaacgctaagcttgaagaaataacggaaacttccagctttatgtcgaaaacaacgaccttccaacccaaagaaagctattggggaaaaaggctaaggattgttgccacggcatacgggtttaataatctgcaggatcgctaccagtatatggttgacgcgtaccccttagagccggccgctatttggaatagtgctattctaagatcgcgtagccttatttatatcactagctcaggggcaagagattcatcatgtcgggagacatggttgggtcgggagcatcatgttaacgcgaacattgataatttggccttaaactttagttcaggggatagattaatcgcaccgatggaagtgacggtaagagtcgactttggcggtcagtccaattcgaatgtttatacaaaaaccaatattttctccagtgagaatattgccgttaataaaagcaccaaaattttcagcgagtgctggaaaagccacgttgggggttactcaccatcattagttgtcaagttcggtgggatgacaagaacttactggggcgggtctcatggctggggggggaaatggtgacggcaacgatacgccgcgtgtggataattactaatgctaaaaatatgactatggggtagtcattttagataagtaggacagggacgttatttacaatcctcaccgcgacactcagtttcggtgagggttattttgacaataacaggtaatgattttcacagtaaaaatgatatcaaaagatcagaaatgtcctacgattagttattttaaccatgatgtgatgtcgcaggccgaccgcggtgatcatttttctcagagagagagtcagttactgagtatttctaatataggagacagttttattcaggacagagtgatgtacagcgaagatgtgttggatttaaatccggcgtcgaataaaagaatattggcaggaagtaaaactaaagcagagtctagctgtagagtaaaattacagacattaaaaaaaataaccatttatttaatcgagtgtaatgaagaaggtttttatttgttgaatcagcgctctgccttatctgaaaatcctgtcggcattaataataaacaggagattaaatatagcctttgtaacaatgattcttttcctgcgcgtaaagataaattaggccaggggattttgtagtaaaagtcagggggaataatgttccccattatgttaataacagcaaatcaatcaagaaaaaggaatgaaatatgcatttaagaaatcactcattcagatcctcttgtcgtcattatattaaaaatgcagaagtaactaaaaaggcatcagaagtttctataaatatagggagagttaattctggttattttgctagtttattcggtgtaagcaataccaatgttaatattagttggaaaggaaattccacgtcattagatctgaataaggtagttaaaaattgttggaagacaataaaaaataataataaagatatggaagaatggcggcggcaggagagaagcgtatatatccctgctgccattaataaatcaatcgacactgctgctggatatttaggtgccaaggtaagcacggagacgaaggatcgtgtttttgatagaacattccaatataggtatatgtctgccgagttttctggtgtgagtaacgtaaagagcgcagctcagacttctattggacaaacggtagggaactatcttagtcggaataattctctagacaatttatttaaaaataatgaattgggaagagatgccagccagccagatatgaaaagaaaaatcagagaagagcattctttagtcagtgcggaagtaacaaatttcatctcagaccagatctataaaaaatatttctcacaggatgtcagtgcgataagaaaagttgcattgcaattaacacttgaggaaacagggatgtttaaggctaaaaaaatcatgccgccgcgggtgtaaattctaagtaaacaaccaacccacatataagtgatattgccagtaaagccatatcttgggtaatgaccgaaaaaataaagcgtgattaaaatatgcaatatatgatcgaactttaaattcacgtgaactaaaagtgaattctcgctttatgatatatagaaggaacaataatgaagattaacaattcaagcacgttggtgatcaaccctactagggtaaatgaaaatagtcagactgaaagtgagagttctcgtctcaaaaaaaatgtcgcaacaaccacggcagtcagtaatacgacatctacattaaaagcaaaaataaacagatataaagctcaaagagatgaagcgaataagacattcacacctaaagaacagcgtgtaaaggagttttatggttcaaagtttactgtgactcaagaaggcgggttactcaccacctctaaaccttatcctaaggaagtacactccttattacataccgatgctaatatatccggagctaaaacggctgccacgatgagggctttaattgccgaggggaatatgcttgcggccaaaaagtcgcacatgcctgatgccaatattgacttggctaaagcgatacaaaacactttgttcgaggcagccgcaaacaatttatcagcgctcactgcacctatttccttacatatagataaagagcagggcatttcactcaataatgctaaaagagaatcggttaatgagtgggtggcaaggaatgataatagtgaaacctttatcatcttaaatggaaataatgatgaaacctacgtcaatttcattgctgagacgctgaaggattcaaagaatatcaatttcattaccagtggatttggcggacatggaacaacggatcggcacaatattgcgataaacaaaaccgaaggcgatcgcttcaaggaaattttggtcgggaaagggatttcggctagccgggtaaccgtcgatcctttctctactaacagtggccaaaacgctacgaatgtcgcagatattctagatcgtgtcgctgattcaggtaaacctgtatcaaccgtcgtggtcagcggtacgccagctgcagtacccaggcagactcttacctacggacaacagctgaagttagataatacaaagagtttcaatatagaatcattcccattctttaatccaagtgaatataacactttggccgatagcctagcgacaatcagagagttttcaacaacgcttaattatctgttcaacacgtcatatttgcctgccaaacccgagctgtattccgatgattttttctctgcggctaaagcatgttttagcacattggaatcgaaattgggtagtgaacattcagagttcgcccaacagaataaacctctattagaggcaatgaggaatgtggacgatgccatgatagagagattccgcagccaaagtttgactgaaaatgataaggcggcggtaaaaacaatagataatttcttcagatctttgttcaatcctcttgaactgacctttaagcgtgataatagctagtcaataccaatgtgccctctttggggggcacattcaatagtttttggagggggcgtcatttgcagcgatatgggattttttatcaggtcatgcagattatctaacgggtacgaagactagaagggcgggtttccttttcggtaaacgtcccaaacttttttcgcatatttcatccgcatttcatgacgatcttttcctgttcctgaattatatgccccgacggcttcccagctataaccatagatcttcatcatatcggatagtattgaggcaccgaccaatatggaaacacagggatctgaggtcaacattgcatcatctacgcctattttgcgcagtcggggaatatggctgctgtttatttgcattaatcctaaatcgtaacttccgttattattttttcctacggcttctggtttcaatccagattctacctgagcgatagaatagagcagcttggcctcaatgccgaaaaattgttctgaataggtccagcagttggcgtaaccttgataagggaaaaaaaagctcaggataaaaataattatcctcgataaagtcacgctattcattaatttattttccctggtggaatggaacgattcttgtgataagtggggttgtaagaatattatcagtaaatatatcatcatgaaatgataataactggttatgtataacaagctggttttttggaacaaaagtgacatccggtggattagtaatattaatattaaacataatcataatttgtattgatcttccatttttgttttttgatttcatttgtaattcattgtatttattggtttttatttataatgcttgatttttaatcttatcagatagggttaggatatttattaaataacgctaaatcaatgggtgattgtttgtcactggtacaatctgttctacatcatgaattgatggggaacggtaacaatctttcctagataattaaatttcctctcgttaatactaacgttatcgatatactcttacgcagtgtctcgtcattttctcatcatgtttttactgaatcaaagacatatattgagccaagagatcatgacgctccctataaagaatataatagatatatctttaatcgaatatgtcggaatgtttctgaaacgaatggtaactaacttatggataggcttagtactcatctatatctacaacaaaatgatcggttagagtttcaaaagccgcagctgttgctgactgaacctcataaaagcaccggtgttgattttaaattgatcggtgagaacggcagcgatgttacctgccagtttaagccgggtgaaacgggtatcgcggcttttttaccaatgtcattgcatattatcgaagggagtatgcgctatcggtcattggatctcattgccctgtgcaagctacaggcatttatagatacttcgcttaatcgcgtaggttttgaacgtaacaatgatatttgctgggggtttgaacccctagggtttcaagagaatgtgacttttaaacatattgagtattggttaatccgtcaatcgttacgggcagactccggaacggggaatatcgccagcatcttacgttctaccgaatggtatcgcttagtcagatttttactacaggaagcggatagcaccgaacgtttgcaggatttgggcgcacgctatggcgtttctgtgtctcattttcgccgcctgacgcgtaaggctttgggtaatacaaccaaagtagaaatgtgcgattggcggctagttcgggcgttattagatctgatgggagaacagaaaagtttgactacgttggcgatgaagcatggttattcgtctctttctcatttttctaacgacgtcaaaatatcattaggtgtttctccacgtagcctgaaagatgtcattatcagcgatgctaaaaaatgaattatgttattggttttaaaagaacctgcgtctgtattttaggggtggttgtactagcaggcatgcctgaaaaggcattttctgaggaaaattcatcaagtctttcgggctatgtagcacggcaaaatgatataaaagggctgattgacgctttgtcatcaagaatgaataagccaattattatcagcaaagccgtggcgcgaaagaagattagcggggagtttgatcttaataatcctcagcgtttaattgacaacatttcggcgcagttagggctgatttggtatcacgatgggcaggctatttatatttacgatgcatcagagatgcgcaatgccgtggtggtattaagaaacacctctttttcagcggtgagcaattttttgcgtaaatctggtctatatgatcagcgttacccattgcgctcagatagcgtgagttccacgttttatgtatctgggcccccgatctatgttgaattggtgacaaatacagccaaattcttagatgaaaagaacaacgatttggatggacgctcaaaagttgcgtctatcccgttgtttaatacgtttgttcaggatcgtgattttaaatatcgtgacgataggatcattattccgggagccgctagcattgttcagcaattacttaacggtaatgaatccggtggggatgttatggtgccagcaccggcgacagatactattgccacggatttacctcctcggctggatgaatttcccggtgtcagtcaggcaaaacccaaattaccttttgcagatttgactacggcaataagggggcgtccttcagcctcgggttttcagattgtggctaatccgggaaccaatagtctattggttaaaggaagcgctgagcaagtctcatacgtgcaaaatattgtcagtgttctggatttgcccaagcgccatattgagctatcggtgtggattgtcgatttgcaaaaagatgcgctggaacaaatgggcgttgaatggaatggtggcgtgaatgttggggggaaactagggatttcttttaacggtggagcatccagtactgtagatggcgcaacatttatggcctcagtgctggcattaagccaaaagaaccaggcgaatatagtttcccgtccgatggtattaacacaggagaatattcctgccatttttgataacagccggacgttttatactcaattgatcggtgagcgtagcgttgaattacagcatattacctatggtacttcggttaacgtattaccgcgttttaccgatggtaacgaaattgaaatgatgctgaacgtagaagatgggtcgcaggttcctgtctcttcagacactccaaatggtttaccggaagttggacgcaccaatatcagtactattgccagggtgcccagagggaaaagcttgttaattggcggttatacgcgagatgaaagtaccgatggggaggccaaagttccactattgggagatattcctctaataggcgggttatttagatataaaaaatcgcgcaactctaatacggtacgggttttcctgattcagccgcgagagattgaatctccgttacaaccggatgccagtaatcttattgccgatatgcaaaaaaatctggccaatcctgcgttgcaagactggatgcgaaattatgtggatagccagaaatggctatagatattggcaagttttcctcttcatcactcgatttgtaccagttacgtcgggataaggtgagcagtgaaaaaagtgctaatacgcaaaaagctgcccaagaaggggctgtgaatagtgacgaaacgcagaatattgcagatgattcaccagccgccgcggtgcagcgttttggcgactctattgatgaaatgtcaattctattatcgcaatttcgcaatcgtcgagattatgaaaaaaagattggtagtgcgagtgaaagcagctttgaacaaattttggacgaggacgtactgcctaaagtctatgcattattaaaagtcacgtcgagtgtcgatggttcaaatataaagaatctattgcaacaggtgcgctcattatttcctgatgacagcgatctggttttggtgctgcgcgaactgctacgtcgccgcaatattgatgaggtagttagacgccgccttaaaatcatgttgcagcaggttgaaaagcaggctaatccgcgccggcttaaagctggaataaatgtggcgtttaaggcccgcttatttgggaaggcactgcagcttgatccggcactcatgcgcgagagttaccgtgattttttagagagtgatgcccatgaggtcgaagtttatcaagattggatttcgacatatggcgctaagcatcgtgccgcggtggtcgattttatggaaagttcgctgcttagcgatatggatgcccaggatccaagttgttctcatattgaatttggtaatttattagggcggttaggacaggtaaaactgattcgttcaagcgacagtgcctttatagataacgtattgaaaaatgccttaatacgggcgcataacgattcggaacaagcttggttgttatttatgctatgcgtattacagcatccggaacatataaaagattatttacaagaagcgattggtgagagaataaaattaagtaaacacgcggaacgttcctcgttactacatattatctcgcaagcctgtaaaaatttacccagagaattattttatgaacctgaagatgccgatgtattagcgcgggaattcgagagattggcaacaatagcctatcgctacgagttaattgagcttcgtcggggcaatttagagtaaacgaaaaaattacccggctcgcacactgactctattgttaaaccaccgcccgttattatgaattcgagcatgtcgggttgtgcctgaaattgcagtagaccttttactgttaatttcttattgcgtatatgatttataactctgttggcatcaataatggaacctgattttgattactgaatttcttattaaaactagacggcatccagagttatttattctactgctggttattgtcattattgccatgttggttataccactgccgacttatctggtcgattttctcattggcctgaatattgttatttctgcattggttttcctgtcgtctttttatattgacagaatattgagtttttcgacctttccagccgtactgctgataaccacgctgtttaggttggctctatctattagcaccagtcgattgatacttaatgatgctgatgcaggcgatattattgcgacattcggccagttcgttattggcgataatctgatcgttggctttgttattttctctattgtgaccatagtgcagtttatggtcattaccaaaggcgcagaacgcgttgcggaagttgccgctcgtttttctctggatggaatgcctggtaaacagatggggattgatgccgatctccgggcgggttctattgatgcagatgcagcaaaagagcgccgcagcgtggttgaaagagaaagccagctctacggttcttttgatggcgcgatgaaatttattaaaggtgatgctatcgctggcattatcgtcattttcatcaactttattggcggtatgggcgtgggcattagccagcatggcatggatatgtccacagcgctggcgacatacaccatgctgactattggtgatggattagtggctcaaattccatctctgctgattgctatcagcgccggttttattgtcaccagagtcaacggcgatggcgataatatgggccagaccatgatggaccagttattaggcaacccatttgtgttgctgattgctgccatgctggcgctaggaattggcagtttaccgggtttcccgttctttatttttgctattctcgccgcaggactcagtggattattctatttcaaatggagtgagaaaaagcgccatgcagctaaaaagaatgctccggcagaaatagcttcaggagaaaagaatatcgatgccgaagggacatctctggggctaattggtgatctggatagcgtggcggcagaaacagtgcctttaatcctattggttccgacagcgcaactggccgcattacagaaagccagcgtggtggagcgttatcggagtcaattctttatcgattacggcattcatttgcctgaaatgatgttgaaggcatcggataatcttagtgctaataccgtcgccatcttaataaatgaaataaaagcggacgaatttaatatttactttggcctgctgcgtatcgtcaacagtaccgatgagctaaagcagttaggtgttgaatgcgttacccataataaagaaagttggaccgatagcactaatcaggcatcgcttacacagctaggctatcagcttagaccggcaattgatgagctctattactgtctgtcagtttctctggttcgccacgttaatgagtattttggcgtacaggaaaccaaagatttattagataagttagataataaatatcctgacctgatgaaagaagtcctgcgtcacgcgacggttcagcgtattgccgaggtatttcaacgcttgctgagcgaaaaaatatctatccgtaatatgaagatgattatggagtcgctggctttatgggcgcccagagaaaaagacgtgattgcgttagttgaacacgtacgtacttcattatcgcgttatatatgccataaattttcacagggagagacgctacgcgttattaatctctctgcggagtttgaagagaaattacggcagggaataagaaatacctccggtggttcatttttgaatctggaacctgcggtagcggaggaactcattgatgcgctgacgttagccacagataaattgacaatatctaataaagacatggttattttatcttcggtagatataaggcgatttgttaagcgctttatagattctcagtttaaagacttggaggtaatgtcttttggcgaaatcacggatagcgtatctattgatgttttaagaactgtctaatcaacaaggagataataatgaatctagatattgtaactttaattcgtgacacactattggaaacaggctgcgatgaatcgttattaaatgatttcgacggccactcgactatatcgctagatttttcagatcgtgccagcatgttaattagcctgattgacgatcaggtctggttatggtcgcgtattggtgaggaaaatactcacgtattaagtcaaaaagctgatgaccttttaaaaactttaatggaaggctgcgctttcactccgtcagggcaattacagttagccaccaatgacgggtatatcgaattaaaggggctagttaattcaagctataccgagaccagtactcgatttgctgaagcattagatgagttctttgcgctgcaagaaaagtttgtggaaattcttcaataatgagtgaaataccattgatccgttatcaggctcatcctttgcgcctgagcgggccgattcttgaatcggttctgccaggggtaaagatcggtgaaatctgtgaaatacgtcagcattggcaaagtaccgaggtggttgctcgtgcccaagtgctgggatttaatcgcgatctggcggtacttagcctgattggtaacgccaatggtttatccagagatgccgtgattagcccaaccggtagcgcattgacggtcgcactgacccattcattattaggttgtgtattagatccctcagggcaagtcgtcgaacgattctccgattccgccgccatattggggcatgaaattcgccccattgatgcaccgccaccatcatatttgcagcgcgtaggtattcgtcaatcgtttattactggcgtgcgagccattgacggcttgattacctgcgggatcggtcaacggctcggtatttttgctgcggcaggctgcggaaaaactacgctaatgcatatgttgatcgagcaggcagatgcagatgtgtttgttatcgcactcataggtgagcgcggccgagaagtgactgaatttactgatattttacgaaggtctgggcggcaacagcagtgcgtgttgatttatgccacctcggatttttcttctttggatcgctgtaatgcggctttagtggctaccacggttgctgaatattttcgtgattcaggcaaaaaagtggtgctgtttctggattcagttacgcgttatgcccgcgctttgcgggatgtggcattagccgcaggcgaagcaccagcccggcgaggctatccggcttcggtatttgaggctttgccaaaattactcgagcgtcccggctgtactcatagtggaagtatcaccgcgttttataccattttactggaaagtgatgatgaaccagatccaattgcggaagagattcgctctattttggacggacatttttaccttagccgcaaactggcggccaaaaatcattatccggcaattgatattttacgcagtgtgagtcgtgtaaccggtcaggtttgccaaccgtcgcatttacacagcgcagccgaagtccgacggatattggcgaaaatcgaagaattacagatttttgtggacctaggggaatacagcgccggagaaaatgcggaaaacgatcgcgctattcagcgacgtgatgatttattccgttggctgtgtcagcccgttgaagaacacgctgtatttgaaaatacattgagtcaattgcatgaatttgcttcgtaaattcactgcactactactgcgcagtgaaagcaaaactcagcgtcaggagcggatattaacgcagcttgatagccggatacgtgagtgccaaaaatctgttcaggctctagacgctcaacgcaaagcggcaaccggcctgttgcacagtttgcgcccgcaggggcagggactaaatcgcgccatgctgtatgcagtacagcggaaacagtccgcgcttcgtcgccgaattgccaatattgacctggaaaaagtacagcagctaacggatctgaaaagctgtgaagaggacaggcaaaaggcgcaggtgcagcgtctgagactcattcatcagtctgataaatacaagcatttgcaaatgcttgagcggaaagctcaccgccagatggccgaccgaatggaagaaaccgaaattgaggagattattgcatggaacaagtaaatagcgtttcaggagccaatacggggcgaacggaaaatatctccgaagttgcgcaacctatttccgatattgtcagaaagaaacagcaggaagaaaagggcgagcgttttaccgagatcgccgataaaaccgttccgtctatgccaaccctattatcgccgctattggccttgcaacttggaattggtcataacgctgactctacaaccaaaaaggctgaaataagcgcgctgaaaggatctaagcttcaggcaactcatccgcgtttggattatttaactcaggaaattcctgctaagccgatcgcacagcttcagcaaaggattcctgagcgtctaacaacgaaagatatgacagataaatccctactggctgctctaccgacgggaaaagaaacaaaaaatattgaagtaataagaaatccgcagccgttgcagaaaaatagccatgtcacagatgccatacccgttgcttctcttgcccggttccctacagataaaaccagcgagttttctgccaatggagatcgtcaaaatttaactgcgccgaatcatgaaaagttaaatattgtgcaacagattggcggcaaaccgacatcgactgatatgacagctactggagagagtgaagctttatttcctcagtttaaaaaagaggtaaaagtggattctctagcctcagataaagggcgccctgaatggttatatccggtaccgaataaatcaacccattcggtggtggatatagcaaccaaggctgcattgcctatgggaaaaaccgataagtttccacagccgcaatcaggaaataatgaaatagaagggccagggaaactcacttaccgttttaaacaatggggtgaaggacatcatgtcaatatttcaacgcaaacccaaaatcactcagctcaggtggtctttcaaccctcggacgccacggttcaacagcgtttaggcactggagaaatgccccagcattggagcttattgcgtgacggggaatcgcaacagcagcagaaacagcatcaggaacaaccgactcaggacgaggaggaagctcagtgattggccggtattttcgtcaaataagtcaggaacaacttgtctggtcacgtgttgctgaacattgggaacggcaaggtatcgacgtgagttttacgattcctccgcaaaatgtttgcctggtgtcatttgctactgatgccggttgggaaggccttcttgatttacgtaactggtttatgcaaatgatgccagaacaggcagggttagcgaccagcgcttttaccaatgaacaaattaaaaatttatttatcggatgctcgcagccgataaatatggcgttgccggaatttagctatcaatcaatgcagaatattgagacggttgaagataacaagctatttaatactccgttgtacgccatagatacggatcgcggtcgagtatggttgactaaatttgttcacgaatctgtcaatattccagcaaaaaatcaacggacagatttatcccatcttcctttgccgatatgttttgaaataggaagtagcaaggggagtttaaggttacttaataaattaatctgcggtgatgttttacttattactgatgtcaggcagcaagtaacaattcatggcaaacatattagatattaccagcgtaatggagatgaaataatgctagaggaagcgatgtcagatatgcctgtagaaaacaaatctcaggataaccagagtgatggtagccatgaccaagaaatatctatgggtttgtcccctcgctctcaaatgcctgttcgcttaacatttaccttgcaacaaactcaggtaacggttgaagaactggaattactatataaaggacatattttcacctgtgatcctgatgcggaaaagaaaatcatcattagcggtaatggcctggcactggctcgcggcgaattagtttggatagaagatcgcttaggcgttgaaataaccgagatataccacgaggctggcaatggaaaatgatgtttcccttgttgggctattagcgtttgccactttactaccttttattattgcctgcggcacctgctatatcaaattctccattgtctttgttatggtcagaaacgcgctgggattgcagcaaatcccttcaaatatgacgcttaacggtatcgcgctgttgttatcgatgtttgtcatgatgcctgtggtgcaagagggctaccacagttatcgcgagaataatgtcgatattagcagcgtagagtcggtgacttatttcgtagagaatggcttcgaaggttaccatcgctatttagaaaaatattcagatccggagttagcgcgcttcttctctgatgcgcagctaaaaagggacggtgttaaaagtggtagtgcagaggataccgaaagggtttctattttatccctgttaccagcctacgctctaagtgaaatcaaaagtgcctttaaaattggcttttatttatatctacctttcgtggtagttgatttgctaatttccagtattttgctggctttgggaatgatgatgatgagcccggtgaccatttctgtgccgataaaattggtgctgtttattgtgctggacggttggtcgctattgtctaaaggcctaatcacgcagtatctggatctggctctatagctcggagggctggaacaatgaatgaactcgtctttgccggtaataaagccttatatctgattctaatgctttccgctgggccaattgccgtggcaaccatcgtcggattaattgtaggcctgatccaaacagtcacgcagctacaagaacaaactttaccctttggtattaaattacttagcgtcgcgttatgcctttttttagtttcaggttggtatggtgatgtattgttgggctttgctcaagaagtattaacaatagcgttgaaataacctatgcaaatcggactgttttttaatattcacgactggctctacgcaatgatattggcttcggccaggttgatgccttcttttatcctactgccgttccttaataataatactctaacgggtatgatccgtatgccggttgccatgattgtgggggtgtcattgtggccttatccactccaggaactacctgattttgatacgttgttttatttcggactggttgcaaaagaagttatcattggactattaatggcctgttttttttgctggccattatgggtattacatgccgtcggtagcatgattgataaccagcggggtgcgacgctaagtagtagcatcgatccattaagtggtgtcgatacatcagaacttgccaatttatttaatttgtttgctgccgtgattatattagaaagcggcgggcttttgctcatctctcaggtatttcaagcaagttatcaactttgggacccactgtcttttactttgccttccctttatccagcgctaactttcctgagtattatgatggcgaaagcatttattctcgccagtccggttttggtcggctttctattggctgaagcgctgttaggtttattatcccgttttgccccgcaaatgaacgcattttcgctggcgttgacgattaaaagcagcatagcgttctttattcttattttgtatttcaccccgattattccagtcgaggtcattaatatgcgctttcatgcggattcattatttggctggttgaaataatacggtaaaatggacgttttatgtcatcaaataaaacagagaaacccacgcagaaaaaactgaaggatgcggctaaaaagggccaatcttttaaaagtaaggacttggttatctcatgtcttatcttaattggtgccgagtacattattaatatatcgagctttttagaaatggggaaaatcgttaccgaagccatcgcaaatggtttttccagtaccttccatgagtatgcgcgaatggtggcatggacgggattaaagttattgcttccctttttactgctatgcatatttgcgtccgtattcccgacgttgttacaaacgggatttctcatcgccactaaagcactaaagattaattttgcagcgcttaatcctgcgagcggtgtgaaaaagctatttagcttacggtcagttaaagatgtgatcaaatcatgtttgtatttggttagttttatcgttgccgcaaatattttttgggaaaaaaataaagagctcctttattcgcaggttaacggggcgcctcagcagattatattagtttggggggtgctgtttcactcgctgatcctgatatgtctctcttgtctgcttatggtcattattctggatgcattagctgagttcttcctgcacatcaaagacaacaaaatggataagcaagaggttaaacgggaagccaaagagcaggatggcaatccggaaatgaaatccaaacgtaaagaaatacatatggaaatgttgtcggaacaggtgaagtctgacattgaaaattccaaggtgatcgtggctaacccaactcacatcgccgtgggaatttatctaaatgtagatgttattccaatccccttcatttcagtgctggaaaccaatcagcgagccattgccgttcgtacttatgcgaaaaaggtcggcataccagtaatcgaagatgtgaaattagcccgacaaatcttcaaaactcaccgacgctattcctttgtcagtatggaggaattagatgaagtactccgtttactggcctggcttgaacaggttgaaaatgcctggagcagcgaggtccctaaagaataaacatcgttttacaaagatatttttcgctcattatttaagaattgcctgtgtttgaaaggggatgagcgttccttaaatgtagtttttatttacccatgattaaatatcgttatcggcagcagcattcacgcggtaacgaacaacctaggagataacaaggtatgacccaggaaaatacgattattagcgatgatgaaattgaaaacatgctgtgggctgctctcaatcagggtgccatgctaaaagacattcacggtgtatctgatgaaatgatggagcatatatatgctcatgcctaccagttttatcacaaggggcatttagacgaggctgaaaatttcttcagttttctctgtatgtatgacttaaataataccgattactttattggattaggcgcagtgaatcagctgaagaaaaactatcagaaggcatgcgatctctattctcttgcttatgtgatggggaaagataatttcagcccggtattcttcagcggtcaatgtcaattattaatgggtaattttgttaaggccatgcagtgttttgatttggtgtgtaagcgtagtgacgatgaaaatttaattaaaaaagcgaaagtttatttacaaactattcgacaaaacaggaaagaaacgaacgaagaggcagattaagccgaagatcgttacgtaattggagaaattatggctacgacgagtgttaataatacccctatccagcttgctggctatttgttaaatgacgccagcaatgaaaatatggcggcattaaagcaaaaaactcgaatgctgccgcagcagggtggttcaattatggcggcggccaatcaaaaattgcaggcagcgcaagaatctgcacgcaatatcatttccgccggcattgacccaacgctcagtggtgatgttgaagttgagctgaataatgcgcttttacaggaagctccagtcctgagaaaagcgaacagtaatctgactaaagacggagctctgttgctgttattaactcaaatgctgaatttaagcagtgaaatggcattgagtaaactctcgtctaacctttccatattaatgtctaccctggacgcgcgtaagaaagagggagaaaaggcaaatgccgagattgataaagcaatgggcgagaccgagcaggctttatctgagtttgaaaatgcggtaagccaattaggctcggctaataaaaatcaatcgcagaaaaaagagcttctcgatcaggccaaatcagatctggacaagctaaagagagaaggcgtagaaaaagacgatcctcgttatattgccgcggaaaagaaagtcgctggcgcgcagtccgatctcaatacggcagaggcggcaaccagtaaagctcaggccgtggcggatcaaaagcaacaagcggccatgagtctgcaaacgaaacttgaagggttaataaaggcggcggacgttaaatacagcgccgctttacctggcaacgcagctatcgctgggcaaatcgatcagcagaaagaaaaacagctcagcagcatggccaccatgaccatgctgatggggaaatttattgaaatcgtaggtgagaactcgatcaataaattaaagaatgatttagccatgacgcaaaaactccaggaagcgcgtcaaaaggatatgaccaaaaaagccgctgaatacgatgagcaactgcgtaaggcggaagaaacgcgcaagatgaccggctgcattgctgatattctgggcggactagccattgccattggtgctattacatcggtatttggcggcgccggagtagcattaatggcaataggtataggtttaatggttgccgaccctattatggaggcggcgacgggacaatctttgactggcatgattttaaatccatttatggaacatatctttatgccattaatgtcattaatttctaaagtagtggaagagatatttgataaaactccgattggtttattgcttaaagcaatagataaagccaccggggcaaatatgatggataccattcatagcgtagtttctgccgcagtgaccgttgcggttattattgccgtagcttattttgctaagtcagcggctaagtttgtcatcgaaaaaatgggtaaggcgatgacaaatatgattatggaaacgattaagaaaaccatcgagcaagcgctgaaaaaactggtgccgaaagtagttaaaagtgccggtaagcaagtgaatcaggttttcaaacaagcgagcaaaagcctgtccaagtcactatcaaaagatccggtagcattgaaaaagcaattgaataatatggagatgttacgtagcgtaaccaccgttggctctggcgtgactcaaaccaccggcaatatagtggcagggaatttacaggctgatgctatggaggcgttagcggcatttaaactcggtagcgcagatatggaaatactgaaaaaattctcagagcagattcttgcgtattttaaacaagagcaaacgctaatgcaggagttgatgaagaatatgtcctcggtactccttaaacaacaagacacaggacgtactattcttcgcaatatgcacgtttaatatcactccataacctaataggtaaataatatgtcatcatccattggcagtaatagtcacaaccttattctgaattatccgaatctagatattacaaaaaaagaattaaatggcgataaagagtcaattaaaaaaaatgcaaataatacgaatcagccgactgaatcgaataaatcaacggctgaaaataaaaatgtaaaaacagaggggaaaattagccctcaggcggcggcgctgcgagaacctcaaggtgagattcaaccaacggcgagtaaattgatgatggtggatttggctgagaagagaaccaccgctgcggtgagccctgcggacgacacgccaaaaccggcgattgccgcaccgacggttgaaacccagccaacgctgttgcaagagcagctgaaacatattaccggcgtcagcaatttcgctgctgaacaaaccaaggctaccgatgcagcacagcctaaacagggctttgccatcaccaatcttaataattcatttggtgccagattatctaatgtcgtgatgcttgcagtgaaagtattgactgaaatgcgagtggcggaaaataagctgggcggccatcagctagagctttcggctaaagcggcgcaagcctctgccgcacatactatccaaagtggtaaagaagcacgaaatcaagcgattactcaaggtgtcgttggtttggccaccaccgtgggtgggcaagctcgggcgatgaagggcaccaaaatgtcgaataaatcgcttgatgtgtccaaacaacaggctaatttccagaatcaggcgaacaaaagtatcagcgctctgaacaaagtggggccagggcaaaaacctggctctgccgtactacagaatgataaatcaattatcgaaggcggcgcgatccacgataaacaatacagtgcaacgctgaaggggatcgaaagcagtcgccaaatgaataatgcgcaaaaagtcattggtcaaggtaacgcggccagccagatgggcaaccctatgggggcggtagcggcgtcccagttccaggtgaatgaggctgaagagaaagccggcgcggcgattcaggaaaatgagaaatccgtcaagcaggaaacccatgctgaatcagtcaaacgtagcgaccgtgataagcaattgctgaatttgctgatgaatatgctgttccaaacggtaacggcaaaaaatgaaacgatcagcagcatgatcaataacaaagtgtagttgctaagcccccggagttttgggggcgatttttcatatgtctgagcgataagtgagtcagttatggatggaattactaataatcacaacactgtgcgtttttccgagcatttagcggttaattctaatgaaacgtcgcaggctcccgccgctgcggttaatgaagaggcaaaagctgctcgcatgaccatccggcaacaggttttgacgaaaacaaaaactcagttagataccttgcataattcagataaaatcgctcagggcgccaacgcgctgttaggcacattacgcgatattgagcagcgtcagcctgagcgagctgcgcgattagccgcattttctactgagggaaaaagtcagcaggattgtgataaacagctagagatattgctaacacccgataaaagtgacgctcttgctcgcacgcagttagatgcattacgtgctgcggcttcggataaaagcagccttgctcgccgcacattgttaattgacagcaccagtaagcaattgcaaaccattgcacaattggcgcaggcaaatcctgagaactatgacttaacggacgaacaagcggctgaattacaggctgccgctcggtctgttcggttcgctcctgcgacagaaccgacggaaaataaaggtccgatctccagttgggatatttataaggacttggccgacgccattggcgaaatggatgacagttatttatccgtccatgagtacgcagtgaaacaatattctgattttttcagtgatttctccgatctgaaatctaaattacaggaatttattagttccggtaaagacggaaatatcattctgaagtcaggtgagatcagaaaggaattagatgcattactgaaaaaatattctgtaaaccctgtcactaaagccgccgttttatttcctaaacaaagtgagaccggtgggattaaaggggcatctaaggacgatgcaaaggcatgggccagtgaattaggtgttgatccagatacctgcgttaaacaactgcctgatggttcttgggtttgtaccatagacaccagcccgctaacaaaaatgaaaagcgatctgccgcataacgatgttgaagatatgaactctgccaaattccaggcttggatggcaggttttgacgcgcaggcagaaaaactacaaacagctatgcaaagccacttacagaaatacagtaccgccagctccacgttcgataatttaattaaagttctcagtagcactatctccagtttgcttgagacagacaaaagctttttcagtaattagcgataaggaaagaatatgccatcttctatacaactggctgtcactcctcaacttgatttcagccgtatcacgcagaacgctaatacccatagccagtcttctgtggctgcgaatattagtcacatacagaatgtgcctgttaaaccctcaacagaacctgcatgcaataatcccagcagcaagtgttctaatgtgcgtagcgtttgtgcccagttacatacccaaacgcagtcgcagttgcagggttcaaactcccctgagccgcaggctcgtgctgcgaccttaaatgctcccgctgatattccaaccggcgagattttttacggtcagcatatggaacaggctaaagaagcctttctctccgagctaccggcagacaaaaaggctgaggtcaaaggaatattagacaatgccattgatgcaaaggggaaagataatgtcctgagatttatgcagttatttagcgaaaccaaaaactattgctgcgaaaatcagcttacaggggagagtaaagacaaggcgttttctgatatcgctaattctttagtcaaactgctgacacaggataaattgcgtaataattctgcgctaggcgataatagtacaaaaaagaatcacgaaaaatttgctgaattgcagcagaagctaattagtatgggatcagcggaaccgaaaaaacttggtgaacaaatattggttaatcaggtgtggccgctggtgtctgcttattttagcgataatgccgatcctcacgaaatatttcgtgaatcattgtcattgctcgatgggcaaagggatcaaaatatagcggacagtgccaagtcgcggtttgagaatcttactcaggatttcaagctgattgcggtggtattaaatcttctgcaatcgagaattaacgctccgcagggagacaccatcgacggcccaaatccgcccgcggcaccgaacagagaaacgcctgccgctccggcagcaccggccacgccaacgccaacagcaaacgcgcctggagtaacctacaatacttacaactattactttggtgctagttcctcatcgccaactcagccggctaatccaacgactgttacggtaaatccgactatcagccctttatttaatccggtatttagcccatctattaatggttatccggcaggtgacagaccagcatcggctcatgcgacggagactaaacgcgttaatgttgcagataaaactctggaaaacgatgggcagaaagacatcgcgcaaagagaggcaatgggtaagtcggtcattggtgttagtaatgacagcaagccaacgccattcacaacttttgttgatggtaatacgccgggaatggattcaacggaagttcgtgaacccattagccccgcgcctttgatgaatcataaatcgattctgacccgcgacaggtcagcgcagggggatcatgtacctgcgactgaaacagatacccacgacgaattggtggtccagaaaaaagtttctcatcagtcagagataactcggtcaacccgtgtagtaacagatagcatttcacagcttgattcagatgtggtactgcgtagcaagaattctaatcatgaaacgggagtctctactcgttccgcgactattacagctaatccgattaaggctgagataaatgcgccagagacgaacgcgcaggtaaataatagggtagtgccgccacggtttaatggttccgctacgacgtgggattcagttactccgtatttgccgaagcaaaatcatgtcaatccgcctaatacgcgtactgtagggcctgcttttatcggaggaatggaatcgccaaaccgaattgatcaattaaaccggagaagtagtgaagcggttcgtaatagcggccagtttttgcctaagatgactgcggagaaaacctcctcaccagaacaagagagtcataatgtcaatcgtacccgcgtgataatgccgccaaatcggccattgaataatcctacggtgcagactcaggttgaaacagcgttaaatattactgaaacagattctatttcgacaccaaatgcagcacatactaatttaaatgcagtacccgaagagcatccagaatcatttaccgccaaacgccaacgcttcgaagatgagagtaaagggcgtgatgcgtcacgattaaaacctaaaaaccctgcacctgcggcggttgattctgatcgaatagtgatgagtccaggttcttcctcggcattatctgggtatcagcctcctcgcagcgcaaacaaataaatttaactgagctaatttcacctttccttattgtagataaggaagggtgaaattaaaggacagattagatatgaaagcgattattgatgaagttttggtgtcctgcctattttgtgagcaggttgatatttcaccagataagcacattgttaacgatctttatgctgactccgttgctttgcttgatattacgatggctttggaagaacgattcggatttgatttcaataaacaggatatcgagcagtttgaaaccgttggcgacctttacgaaattgtcatgagaaatacggtaactctttagtagtatcttaatgttcaatgaaaatcattattttcttatctcaaggataaatcaatgactcacaaatcactttgagttaatgcatcagccatcatagttttgtaaatatatgtatatatttatcatcggcagtgagtaagatattgcgcagaatctttctttatcaaaaggccttaggttacgacctcaaaaaaatcaatttaatctaaatcataataattataatgatcgtttttttaaagtaatcacttagtgatctggttaattatataagcatgtagatatcttgtgagtttatatttgcaggccgattagtctatttttcagcatggctgcgactcgttagatatgttgcataataagaatgatttacattacaccttgtaaaattaatattcccttttgattttttaaagggtgaacataggaaagagtaaactatgagggccgcaaagtgattcagcatcgatttggtaattactcattaagctatgatggcgaccttatgcatcttaacgaacgtattcttattccaccgaaagaattggcgctcttaagattgtttcttgattcacgagagcaactgctctctaaagatacgattattgaaaaaatctggcatggtgtgcagatttccgatgagtctttaacccgctgtgtttatggcctaaggcgattattaggtgggaataaagattatattgttaccgtatatggacgaggttatcgctttgttcctcctgcgaaggaaaaagaagcttcaacgctgtttttctcccgcagtaatagcttctttcaacggccggatcgattcatctatccattactaaattaatgttaacttgacggttaactatatggttttataatgatttttattgagctttacttcgtgttttgagagggcgtattttatatggctctctcgctttttcatgctaactcttctacttagcctgttcctttcggactgtaaacctgcatcaatctctcatcattttttaatcaagatctcactctaaaaaatgtttctaatagcgccagtaatttgaatatttcaataaattaataacgcgcgcttggggctagaactctcaattatggttaatgaaactgaacatggcggcacatcaccacgcattgttgtgcgtctacttaacagtgtcttgcgagggtgcgagtttgttttagactcgggtacaactttatttatcgtgtctgaacgggagaatattcacgctcaaaattcaggaacggtacttccagaaaatatgatatttgttcctatggaacaaggcggtgttagctttgaagccgtggtggagaataatcaaaatgaaaaaaccactctaacactacgagagttaaaacctgacggtaacatagaaaatacagttaatcttaacgaagtgattcatatcggtactttagatctcgccgcgcgttttgaacatgatacgtggagccaggatatcctcaaccatcctgaaacgggaatcaaaaatacgtcaaagccgatggagaagaaaaaaggttggttttggactgggctgatactcctgttgctcacgctgtgcataacggtttggggctatacctattttaatagccagcagcgcaagattttagaaatttcgtctctgcttggatataaaaagaatcagtatcagtatcttcagggaagagacaagataacttatattctggccaatgatgaaaaatcaatgtattgggcacaacaagccttggtaagaaatccaccttcatcttcagttaaagtggtcaatatcccggcagaggagtcgcgtattagcctttggctgaatgaacattggccagcgttaaaatttcatcgcatttatctcagcaatcccacagagccggttgttctgttgagttatgaaagagggcgtctggacaatactcagaaaaacagattgtctgaattgctgaaaaaagaaataccttatgctgattcaattgtttttaatcagatgaaagattcgttagtggcgaaagaagctgagcaaggcttgagtaaaatgtcgattgtttttagtgagaataagaacgttgatagcgtcacttttgttatccggggagaaatggatgacagcgaattacaaagaataaagacctttgtccaaagttattatcagctttgggggggccagtatgtgcaattttccatagagctaaataatgactggctcaagggcaaatcctttaaatatggtgatcaggggtatgtaaaggtttctccttctcactggtattttcctaaacctttatctttaaatgagaaataaatatggctaatcctccaatttatgcgacacctccatgggaaggttttctttccgagaaatcagcctcttttgatactggcgtaaccagtttgaacgaggaacttgagaaagcattggcctcgttgaaaggggatccatctgacccgatgctgttagcacaatatcaatcacgactttccgaatatacgttgtaccgaaatgcacagtccaacgtggttaaagtctataaagacgttggttcggcgattattaccaacttccgctagttattacgtatgagttattacacaaagggtatgactgccctttgtcattaattaattgagatcactatgtccgaatctattactggagttatgtccgtcacggcgttttctcatgatgcggtgatggcatctgatgatgttatgtcgctagatagtctggttatgcaggctctggctaaaggcgtggtgacatctgatgctgaaaaaagccatgtgctgaataaaatacaggacccgcaaacaacgtcagatccggcacagctattcgagttgcagcaaagaaccgctgaatataatttgaaaatgtccttattcgccacgctgacccgaaaagctatcggggcagttgaaaccgttgtgcgtgcataacaatgcttaaatttaaaatacttgttcctctgttgttgttgttattggtcggctgtaaagagcaggagctgcttaaaaagctcgatcaaacgcaggccaacgaaattatcgcgttattacagcgtaataatattgatgccagtaagaaggaaattaccaaagaaggctatgtggtatcggtcaataagatcgatttcgccgcggcggttgatctgatgaatacctatgatttacccaccagacctcgaatagaaattgccgaaatgttccccagcgattctttgatttcttctccacgagcggagaaggcacgactttattcgggaatcgagcaacgtctcgaacagtcgttacaaaccttgcaaggggttgtttcagcgcgggttcatgtcagctacgatttaagctcgagtgaaggccaaaagaatagtattccggttcacctttcggcgctggtgaaatacgatgctgaaaatattgatgccacagtgatgatcagcgatgtgaaacgcttcctgaagaatagctttgatgacgttgcctataacgatatttcggtggttctttccaaaataccgcaaatgcaacatcaggctcctttcaccgtgaaaaaaggtttaggtgggacgctgtggtttatgattgccgcggtaattctctttattttttccagtatcgctatgtacctgtatcggaaaaaacgcactgaaattcatccagcggcggaaagtgaatgagcttgaagaagggaatgggtgttagccagcttgaccggatattatttgatcctttgtcctggatacatcctgagcgcgttcgaattcccgaccaatttaaccgcggcctatgccgcagcgtaatcaatcaagtcttgcttgacgcgttgaatatttcgacacaatacgaccacaggatatctaatgggctaacgcgcctttttattgataactggttcattcttcccaaggtggcttttttaatgagctgccagcgttatcgtgcctgtctggcatatggtggaaagctggaaatgctttctgctatggcacgtcagttcgcccaattagaattaatagaaaccagtcgttgcccgtcagatatctcgccggatgttcagtggctgcgggctcaggcaataaatgaattattgtgcttcagtcaggatttacctgacgcaatcaggcaacgtattccattactctttcctggcggtggagcaatcagccttgagcggcagataaatccgactgctgatgtattgttattaaggttagctatccaacatgcaaaacgatatagagactagccatccgctaaatgcgctagaaggtatcttgttaactaagtcggctattttacgacgcaagatggctaaaaatattctggtagaggctcagattcgcgccagaaaaataattaaacaggcgcaggcagacgctgaaattttacatcatcaggcttatacccaaggttatgaaaaagggatagtgagcgcggcagaagccgtagtcggttatatggaagattatcagtctctcagccaccaattataccaagagttacagctcgaggttaaaaacatgttatcggggatattacatcaagacgaagtttttcttgccctgctggataattggttacatgaattgcgtgttgaagatacgccacaatctctgcatctattacttcctgcgacgatgaatcaaggctcgaaagaattggctggattgctggagcgaatttggaaagggccggtggtgattgattaccacgccgatcggcgttttgtcatgaaatataaagatcagctcgctgagtttattccagatgagtttattgatagcgaaatgcccaaactgttagggacaaaatcactacgggaatcatgtgggaaactgtctgagaatggcttacagcggctgagaactgtactgactcgacatttggataacgcgccacagaatttaccggtaaacgaggcgtaattaactaaggatgaatgtgatgatcggtgatattaataagattagcggtgggaaccttgcaggggatgtggctgataacacaaaggtagaatcgctggatgtcatgatgaatcaaaaaacagatatacccatgacgcctgaagagtttgctttcaaaatgctttataacgagtggatgcaggaaacattattatcagacggacttcgccctgaagataaggttgaatggtgaaaccgatgatttttaaaagaacaacatcaccgctatattttctccctttggggctagtaattgttctgagtggctgtagttaccataaacaaataacccctttgtttaaatcgcaggaatccttaacgcgagctgaaataataaagcagttgcagtgcaatgatgctaaagataatacggctgactcattgttaccggtggcgctttaccagcaaatgaatcaatgtgctgaacagggaaattaccgctcggctacgttgttattttcattagcgggaacctacacctggtacgacgccagtcgaatagatacggattcggcgcgcaataaacatgcacaattactgggagaggctctcggacgattagcgccagagcgaagagaatacctgtggcgcaatattcaatcggtgctaggagatcgccaacagctggataccgtttgccaaatggttcgcctgatcggcccgccagcataccagccggattatatggctggaggtgagggtaagatgatgcctgatttttcggcgttgccacgttgggatggagcattgcagaattatctacattgtccgatagattaaatggtcggattgatattggccagccgcttttgtctttccattttcaatcccttcatgccaatggcgtttgtaaattaggggtggccaatttaatttcccatcgttcacaaacgccggttccaagcagtgattcagggcataacgcggataaatgcaaataatagtgccagtaggataacgattacccccgtggctacagcaagcctttcagaaaatagacgacgcattaggaatatccttaggcaaagtgataacgttcggagtggtatttggatagcggcacgttcaattcatccaacgctttttctatggcatccatcatgatatctgggccgcagataaagtattcatggtctgcatattcgggcggcagatgacgttttagcagttcaccggtaataaaaccacgttcacccggccaatccggcggtggctgggtaagtacatgtaccaccttcagatccagttttaattgcaacgactctaactcttcgcgaaaagtaatggattcccagcttttactgccataaagcagaatgacagggcgtttatccccgcgatcggccagcgtgcgaatcatgctcatcatgggggtaatgcctacgccgcccgcaatcaagatatgcatatcggccggatgacccaaagtaaaagcgccgtaaggcccatcaaggtaaagccgttgtccgggagtgacctctggaattctctgagtaaagtccccaagattgcgaattgacatctcaactcgcccatcctgagcctcggcgctcgacgaaaatgaaaatggatgaccggtaatcttaaacgggctgccccaaagcgttaaccagccaaactgacccggagtaaaacgaaagcccttatgcccatccggatgcatcaccaaagtcacggtatcgccgcgctcccggcgcacttcgctcactctataaggttttcgtagcataaataacggcttaaccaggcgaatgtagagcagcaaggaaaaccagaaagcgatcagcgccacccatagcccgcgtttccacgggtcttgcaaatagaaactccagccaatcatatgcagaataccggcgatcaccgccagtaatgcgagaataatgtgggttagatgccaaatttcgtagcgaatttttaactgcacacgccataaagccgtcacaaccaatgctattaatgaataagttgaaatagcggcgaagcgggcgcgccaaggtgcttcgataaaattcagcagagccaggagttcggggcgaataacaaacagaattatcgggtgagcgataaccagcgcaacggcaatcagagaaatgcgacggtggaagtgataaattacgtcctccccccaaggttcagttacatagcgaaagcgagcggtcaggccgaattgtagccccatcatcgccaaaccggcatagcctagagccacagaaaactcggtccagaaatctcgcgcaggcggcatggtgccaagcaacatggcaaatagcggagccagaataaagaacagataggttagaatccaaagcgtgctgcgtatggcataaggcatctattgtccctttttctggatcacgatatgactaagtataatcggacaatataagcctccatttttttattaatcttgaagcgttcccatgcataactcattgtaaaaactgaattgtgccctgcgagctaaattagctaaaggggaggggaaataccggcgggctatcaccctttttggcgtcaacgttgtcaattcagtcggtttaatcaattggcttaattaataggagaatagcaaccggaaagtcatctatgcggttatagcggctcttgttgtgttgtgcagtgaataccgccaccgcctgctgcgatcccgtcaatgttaatcatcacgatatctctatttggataaaggtgtttaagctgcgctttggccgctgtatcagtgattttgtcgccaaactccggtgcaataaccgcattattacagacatagaaattgatataaccggcggcaaaatcgtggtttgcatattcccctcggctatcagaaggattttctaataccacgacgttgagcttacggcctttggcgtcccgcgcattgcgtaaaatagccaaatgctttttagtgacttcgtgatcgaaagactgcggatcgggatcgtaaccagccaccaccgttcccggcgtggtgaaacgggcatagaaatcggtatgaccatcggtaatatctttacctttgataccgggcaaccagatgattttttctaaacctaacaggcgcttgagttcggtttcacaatctgctttgctcagacttgggttacgattttggttcagcacgcagctttcggtgataatggcggtgccttcgccgtcaacctcaattcctcctccctcaagaaccaggtttgtggtcatccgttctacgcccgcctgttcagtgacaaaactggctacgtgcgcatcctgtcgatgcagttgcttatttccccagccgttaaagttaaaatcaataccggcttttttaccctgagcgttatggacaaacaccgggccggtatcgcgtagccacaggtcatctaatgggcaaatcagcagttctaacgccgacccgattaattgataggcgatttggtaatcatcctctctgacgagcatggtgaccggctcatagtcggcgatagctaacgcaatggtggcaagattacgctgcacttccggtaataaacgaccgccccagatagctttgctggcaccaaatgccatccaggtgcgacgatggggcgcgctttcgtcgggcatcatccagcgctgtttatcatcctgatcaatcatagagaacaccttatttgattgtaataataagccgcccgccatcagcgtggcggcctgaataaatcgtctacgggttgccatattttcgtccttcgggtttatgtttactgtagataagtatcgctggtgcggtagcttatctcgcgctggcaccgttcatttcctgcatagcggatgagtggctttattatctgccttctgtttcttgataaaaattgatgtttattgcattaataccccaataaaattaatgtgtgagtgaaaagtgaaccgtattccctctctcaaactattaatggggttcgaagccgcagcgcgattaggcagttttgcgcgagccgccgatgagctttgcctatcgcaatccgccattagtcatcagatttcgcagatagaagctcagaccgggcagccgctgtttcgacgggttggccgaggtgtagaattaaccgtagcgggagaagtgttacagcgaacggtactgcgcacgctggaaactttgcgtagcggaatgagccggattgcgacttatcttgatcctgggctggtggcgatggtttgtccctcgccgatattacagggttggttacagccgcgtttagatgcgctacaacagcagattcccgatctttgtccgctgttatcctccgatgaaaccgcccgttttattgacgaaattgatgtggatattgccattgggagtcgacctctcgatcaggaaggattgctacagcttccttttttgcaggatgagtgggtgatggtggcgagcgctgccgtagcggaaaaattgattcttcacccggcgaatcaccacagtgacatcaccagcctgatttgtctggaggagcatctcaccggtgagaaaaccggcgcgctgctggcgaccttgttacagcgcttccggctgtccgccatttatgatgatcaatctggcgtgatggatgcagtgcggcggggaaggggaatggcgttgctgtcccgtttggcggcagatagcggattacaggatggaacgctggctgtggttgacgactatgcgccgttgccggggcaaacgttctggatttcccgcgtggcaggagaggcgcgatcgcctcaagtcatggcggcattcgcttggctacagcagcaaaataatatatctgagtcattccaaaaacatatttgattgactacagataacccgctttaatttgctgaatggggttttaaaatcaatcggtagcgattaagtgcgagttaggatgaaatgtaacaaataagttaattaactccatgattgcaggcgttaattttatttagtacattgttgcgcgtatttagtctgtatctggtttttagcacgcctaattggaaaattaatacaatctagagaaatagggatatatgaaaacctctcataagttactcatcagcttcatttgtgtcgctgcgctttccggctgtgcacgtaccgttcctgtattaacgccttacaccaatatcacgacccataattctaccgaacagatcaaaacggccatcctggatgcaggtcagaatcgtgactggattatgactccggtggcgccaggtgtgattgatgggcgcttaatgaaccgcgatcacagcgtgaacatccgtattaactacaccccgaccaactacaccattaaatatgtcagcagcacaaacttaaaatctgctaatggaaaaatccatcgtaattataatcgttgggttaataacctcgataaagatattcaaaaacgtttaatggctaatgctaataaataatacggaaatttgagttaagtcggggccggattaaccgtaatctggctttggcgatttgatattggacatcaaaccatggccgtgcgctataactacgataaagataatattagtgcgcttgacgcaattaccgaggcacagagaattgcttttgcgcccatgttatttcaagcggcggtaaatctcagggattcaggcattctatcgctgttggataattgcagaaagcagggcgcgacccggcaggaaattacctgcggctgcgagctgaacgattatgccgtaggcgtgttgttagatatgggcatgagcgggaatattgtttaccaaaccgaaggccgctattttatcggaaaaattggccactatttactgcatgacgctatgacccgcgtcaatatggattttacgcaggacgtttgctatcaaggcttatatcatctgaaagaatcattacagcagggtaaaccggctggacttcaggttttcggttcctggccgacgatttatccggcgctgagccagttgcctgagcctgcgaaacaaagttggtttgctttcgatcatttctattccgatggcgctttcagcgctgctttgcctcacgtctttgcccttgagccggcaaaaatttacgacgtgggcggcaataccggaaaatgggctttacgctgctgcaaatatcatgcgcaggtcgagatgaccatcatcgatttaccgcagcaaattctgctagctgagaaaaacatcgcgaagcatgggctgtctgagcgtatttctgtccatgaggcagatatattgaccgatgtgcagttaccgcaggaggctgacgtttggtggatgagccagttcctagactgtttctcggaagctcagattattgctattctcaaaaaaaatcgcagcggcgatgaagcccgacgccagagtgtgtattatggagctcttctgggattgccagccctacgaggctggagcatttagtttaaatgcttcttcgctgtattttacctgcatggctaatggtaacagtcgtttttatagcgtcactgatttcctgggttatttacagaaagccgaccttgagttggaaaagcaaatagataatcttggcattggccatactttattgatttgtaaaaaacgatagcggctgactgaaaaaagccgaatcgaggcactaaccgaaaaattataagaaataaggggcaattgggcatcagtcaattattgcctcggtatttttctcattttctccgccagagatcacgaattcatgcagtttactctgaacatcaccgattggcaggctatcgcgcctggattagccttggcagatgaatggcgcagatgggctaatcaatcgcctgccaggatagatcacacccagccgctggctaaatgtagcctgttgccgatgatgacggctcgtcgcctgagttcaggaagtcgtctggccgtggaatgcgggttagcgattttgcgccgccaaccggtggatgcgattgtatataccagccgtcacggtgagttggagcgtaactaccgcattttgcaggcgctggcgacggaacaaagcctgtcacccacggattttgctatgtcggtgcataattctgcggtgggtaatcttactatcgccgccagaaaaccgctggtttcatcgtctttatccgccggcgcggaaacttttcagcaaggtttgctcgaagttatggcgttacatcaggccggctattcccgcgtattaatagtggatttcgatggcgtaattccagatttttaccatccatatatgacatcggatatgccaaaatatccgtttgccgtagctttactgattgaaccgggtgatatcttgcgctgcgctacccgcaaggggctgtcgcccgagccggaggtgccccagagtctgcaatttttgcatcattggctgggttcgcacgcttcctttgtcgtaaccggcggtcgatttgattggcagtggagccgttaggatgaaagcgttgaagctggggcgacaaattaatgggctgtggcggctgatcatgacggggctatgttttgccctgttcgggctgggcgggctgttattatcgttgctgtggttcaattttctcctgctgactcagcgtgatggtcagcagcggcgcattctggccagacgcagcatttccgccagttttcgcctgttcctcgctttggcccgcaggctgggtgtgctggattaccgcttgcagggcatcgaaaagattcgcgctgataaaggttgcctgatcgtcgcgaatcatcccacgctgttggattacgttattttggcttcggccttgccggacgtcgattgtctggttaaggctgaactcttgcgtaatccctttgtaaacggcgtgattaaagccgccgattatttggtcaatagtcagggacaaaccctgctgctggcctgtcgccaacgtttaaaccgcggcgagaatattttgatttttcccgaaggtacgcgcaccagtccgggaaaaccgctgaaattacagcggggtgcggccaacgttgctgtccgttgcgagtgtgatttgcgtattgtgcatattcactgtagccaacaaacgctgaataaacagagccgctggtatcagataccgccagaaaaaccggtgttcagcgttgtagtgggcgaacgtattgctaacgaatattttgtggctgtcgaagaggatgcgcaagcgcttgccgctcgccagctgaatcgacaattagcccagttattgacgcctgagaatggccaacccatggatacggatgatgcaagaacgctctcttgaattaaaaaaactaattattgataccctgaatctcgaagatatgactcccgatgagatagacgcagacgccgcgctgtttggcgacggtttgggactggattccattgacgcgctggagttaggtctggcggtcaaaaatcgctatggcgtgatgttatctgccgaaagcgaagaaatgcgtcagcatttttactccatcgccacgctggcgtcattcattcaatctcaacgcgctaaatagtcggataacttatggataaacaagatatttaccaggaagtgtcggatctcttggtcaaacttttcgaaatcgaccggtcgcagatcacgccgcaggcgcgtctgtatgaagatctggaattagacagtattgacgccgtggatatggtggttcatttacagaaaaagaccggccgtcggatcaagcctgaatcctttaagtctgtgcgtaccgtgcaagacgtcgtggatgcggtagaacaattattacagcaaccaggctgatcggttgtttcggaaaaccacgccgtttatgcaaaatttcctgcgcatcgccaatgggctaattatgttgttatggccgttcattatttgggcgggcgtgacacagggtctgtccttctggttaattccgctgtttattgcctttttcctgctacgcctgtggttactgaaagatcatggggggctgcaaggtcaaacggacggccaaatgtatgcggggaaagcgctggcgttaaccggtattgctctttgcgctgcgagcgtgctgatgcgcgatcatcatgtgctgatgtattacccggtggcggttaatctggtgctgttgattctgttcggcagctctctgttttatggcatgccaatcgtggagcaaatcgcccgttggcgtgagccggatttaccgccgcagggtgtgcgctatacccggcgtgtcactcaggtttggtgtttgttttttatcatcaacggctcgactgcactggcgacctgtttgtataacgacatgaaaatctgggcgttatggaatggcatgctgagctatatctttattggcggcgtgatgggcgtggaatggctggtacgccgacggataaaaaaccgatgaatacattaccgttgactcaatggctgtctgaagaacgggcgggtagcactttgattgcccgccgcggtgataaagatatcgacctgaagacgtttcgacaggatgtgacccagctttatgcgcgcctgataagcagttcagaaacctgttgggcgctgtgttttaacgatagctatcagttttgtgtcgcgctgctggccacgctgtacgcgggcaaaattccggtactgccagggcataatcggcgagcgcagctcgttgagcaaagccagcatttcgagggggtattaagcgatctgccgctgaaactagactgccctgtgtggtcgctatcggacaccgcccctgcgagcgtgccgttaccgtcgattgccgctgacgctagtctgcggttattcacctcgggttcctccggcgaaccccgtcgggtggataaaccggttgccgtgatggatagagaggccgtctggctggctgatttatggggcgatcggctgagtcactgtgtggttcgggcatccgtaagccatcaacatctgtacggtctgacgttccgcatctggctacctttagcgctagggctgcctttcgccagcgaaacggtggagttccctgagcaactggcgaacagtccgcgctgcgcctttattaccagcccggcgtttttacagcggctggatagccagttgccgccgccgcgttgcgaatgggtggtttccgccggtgggcagctacattttgacgatgctcaacgagcgcagaactggctcggaatcacgcccgatgaaatttatggcagcactgaaaccggagtgatggcatggcgtagccggcatcatccgcagacaccgtggcagccttttagcggcgtgcagctgagtcgcgatgagcaggataactggcgcgtggtttcccctttgattcccgatccgttgggaatggcgttggatgatcgaattattgtcgacgatcaagggctatttacactggccggtcgtcgcgatcgggtagtcaaaattgaagaaaagcgtctgtctctcagtgagattgagcggcgattgcagactttgtctggcatcgaagacgttgcggtgctggtggttaaacgcggtgcgcggcaatgtatcggcgcggcggtggtgctgaatcaggcaggattggacgaattagagcaaatcggttggctgcggctgacccgccgctggcgacagcagcttggcggttggctggaaccggtggcattaccgcgctattggcgcaaattatcggttattccgcttaatcagcaaagcaaacgttcttggcctcagttacaggagttatttaatgaaacccgttgagctatcccgtcaacagtcggaacggcatcagatggaggttagactgtatctggaccccaaattaagctggtttaccggacattttgacgtacaaccgctgctgccgggcgtggcgcagatcgattgggtgatggggtacgcggcagatatcgcgggcgcagcctggcagttttccggtatcgataaagtcaaattccagttgccgctgttgccgggcaatcaggtgttactccgcctcgattggaatgaatcccgtggcttgctcagttttagctatacgctggatgaaggcgtcgctgcgcgcacggccagtagcggagccataaaattatgtcgttaaccgttcacgccttcgcgccgtgcgtggttattccttgctataaccacggcgcaatgatgaatgatgtgttggcgcggctggctccctttggcctgcactgttttatcattgacgatggcagcgaacctgccacgcaacagattttacagcagttggccggaacgcactctggcatcacgttggttagattgccttgtaatcagggcaaaggtgtggcggtattaacaggttttaccgtggctgccgaggcgggatatagccacgtgttacaggtggatgccgatgggcaacactgtattgaagatattcccgagatgctgaaacagtcgcagcgctatccggatatgctgatctccggccgcccgatttacgaccagtcggtgccaaaatctcgtctgtatggtcgctatattacccatgtgtgggtatggatagaaactctgtcgctctccctgaaagacagtatgtgcgggtttcgggtctatccgctggctccggtaatagccctgatggcgcaatatccattggggaaacgtatggattttgatacggaaatcatggtgcgcctgtactggcaaggcattgatagtcgttttgttcctacgcgagtgacttaccccgccgacgggctttcccattttgatgcactgcgggataacctgcggatttcgtggatgcatacccggttatttttgggcatgttgagacgtctcccgcaattgttaacgcgacgtcgtccgcgtcactgggctggagtcaaagagcgtaaaggtctgaacggcatgcgctttatgctcgcggtttatcgtctattagggcggaaaactttcgagatattactacgtccggtagtgggatatttctggctaaccggccgaactcagcggcaggcctcgcagcaatatctggtacgtttgcagcaaactgcccagaaaaagtcattggctttgccgggcaatctaaccagttatcgacatttcctgcggtttagtcgcgcgatgctggacaaagtcgccagttggcgcggggatttgcgactgggggagcaaattgtatttgctcccggagcgcaagaaaccattaatgccgagtctgacggtgggaagctgattctggcttctcacctcggagatatcgaggtgtgccgcgcattagcacagcaggatggtcatagggtaattcacgctctggtatttagcgaacatgcccaaagatttaagcaggtattggaagaaatcgcgccgcaggcggggattaatctgattcccgtgacccgcatggggccagaaaccgctattttgctgaaagagaagctggacgccggtgaatgggtggcgattgtcggcgatcgtacctcggtgactacccagcgcggtggagaccgccgcgtggtgtggagcgaatttctcggtgcgcccgcgccgtttccgcaaggaccatttgttctggcatcggtattgcgctgcccggtgttactgatgtttgccttgcaccagcagggcaaactccatatccattgcgaaccttttgccgatccgttgctgttgccacgtcagcagcgtgagaccgcattgcaacaggcggtggatcgctatgcgtcacgtctggagtactacgcgctgcaatcgccgctcgactggtttaacttttttgatttctggcggctgcctgattcgccgtctggcaaggagtaacaagtgctgaccgatgcccgttttaccgccgaagtagagattaccgtgcctttccacgataccgacccgatgggcgtggtatggcacggtaattacttccgttatttcgaagtggtgcgagaggcgctactgaatcagtttaattatggttaccggcaaatgcgtgagtctggttatgtttggccggttgttgatacgcgggtgaaataccgtgacgtgctggagttcgaacagcgaattcgggtcagagcccacgttgaagagttcgaaaatcggctgaaaattgtgtatcagattttcgatgctcaaagcggcaagcggactaccaccggctataccattcaggttgccgtcgaagaaagtacgcgagaaatgtgttttgtcagccctgatattttgtttgaaagaatgggaatcaaaccatgaaaaaatggattttaatgttgtcgctggcgatcgccgctggcgcacaggcagtgacgctggatgagttacagcagcgtttggcgcagcagccggtggtacgagcgcagtttagtcaggagcgccagatcaaggatatgccgcagccgctgcgttccagcggtgagttactgatcgcacagaaaaacggcctgtggtggcaacagcaaaaaccttttccattgacgctggtgttggatgataagcgtatggttcaggtaattaatgggcaggagccacagattgttaccgctgattccaatccgcagatgttccagtttaaccacttgctgcgcgcactgtttcaggctgagcgtcaggtgttggaacaaaatttctcgctgaccttcagcgacttaggacaggggaaatggcagttggagctgaaaccgaccacgtcgccgctagataagctgtttaacactatcacgctgcaagggcagcagtatctcgatcagatttcgcttaacgatcgtcaaggggatcgcaccaagattacctttagcaatcagcgcctgacaccagatacgttgacccatgatgagcagcaacgttttgtcttctaagccgagtttatgggcctggctatggctggcggcttgcctgttgctgggggcgacgctcacggtattgttaccgcaatccaagctttccagtagcgtgctggcgctgttacctgcgcaaagtatggggcagattcctccggcgctgaacgacggttttatgcagcgtttggaccgtcaggtggtctggatggtcagccccgccgaaggcgatgatccagcggcggccgcgcgctggctggaacgcttgcagggtctgccgtcgttgaccgccgttcaaggacctatcgacgctgatcagcagcagaaatgggggaaattcttctatcagcatcgtaatggcatgattgacccgcagacgcgacagcgcctgatgaacggtggtgatgagcaggctaactggatactggcacagctttattcggcctttgccggtgtgagcggcagcgaaataaagaacgatccgttgatgctggtgcggggctcccagctggcgctacaacaaaataccagccgtttgaggatgaaaaatggctggttggtggctcaggatgaggcggggcgcagctggtattttatccacggcgagctgagtggctcctcctacaatatgcagcaggcgcatcaggtagtgacagatttggcggcgctcgtgaccgatcttaagcatcattttccgggcgtcgaggtcatgtcgcgcggcacgctattttatagcgattatgccagccagcaggccaaacatgatgtttccaccttgggttccgccacggtcatcggcgttttgctattgattctgggcgtgtttcgctctctgcgtccgttactgttgtgcgtgttgtccgtcggtatcggcgcgttggctggcagtacactgaccttattgctctttggcgaactgcatttaatgacgttagtgatgagtatcagcattgtcggtatttcagctgattacaccatttattatcttaccgagcgcatggtgcatgggcgtgaaacctcgccgtggcaaagtctgcacaaggtttttccggcgttaatgatggcgttggggaccacggttctggcctacctgattatgatgttggcgccgttccctggcctgcgccagttggcggtttttgccgccgcgggtctgactgcctcttgtctcaccgtggtgtgctggtatccgtggttatgtcgaggattaccggtccggccggtgccattcatgatgccattgatgcgttggctttccgcgtggcgcactcaacgcacgctgtatttaggtttgccactggtattggcgttgttctccgtagccggactgctacgcttgcagattaatgatgatattgcccaattgcaggcgctgccgccggatattcatcgggaggagcaggctatcacggccttgactgggcaaggcatcgaccagaagtggtttgtggtttatggcgatacgcccgagcagacgctacggcggttagagcaatttgctccgcagttacaacaggcgaaaaaacagggctggctcagcggctaccgtttgctgccattggcctctcaggcgcagcaacagcaggatctgacgctgctgcaacaggttgcccccaacgtgctggcacagcttgataccgttgggatagacgggttgaagatcgatctcactccaatgccggtcacgccggagaactggctcaatagcgtagtgagtgagggctgggcgttgatgtggatgacgttaccggatgggcgtagcggagtattggtgccgaccgacggcgtgcaaaacagcgccgctttggcagcgctggcggccaatcatgctggcgtcagttgggttgatcgcaaagccagcttcgaccagatgttttctttctatcgcactatgctgggttggctgttgctgggagccattgtggttatcgccttgagttacatgttgcgcctgggcgtgcggcgtgggctggtgtgcgtattgccttcgttactttctctcggctgcgggctggcagtgctagcgtttagcggccactccctcaacctgttctcgctactggcgttagttctggtgctggggattggcattaattacaccttatttttcagtaacccacgaggaacaccgctgacgtcattattagccgtaaccgtggcgatgagtacctcattgctgaccttgggtatgctgatctttagcagcactcaggctatcagcagtttcggtattgtgctgtgcagcggtatatttgccgcatttttgctggctccattggcgatgcatcaacgccgtaaagggaagaaatcatgatgattttacgttgtatcttggctatgtccttggctttgatgctgacggcatgcgccactaaacccgcggataatcggcctcaggcctggttaaaaccgggcgtgaaggtcagcttacctgcgccgggtatcacgccggcggtgaatgaacaacagttgctgaccgccacggtgaaaggtaagcaacagtctttgctggtattgcttaatgcagatcggcaacagctttcgctggtgggattgtcatctctgggtattcgcctgttcaaactgacctacggtgcgcaggggatcgaaagcgagcagtcaatcgtgctacctgagttgcctccggccagtcaagttctggccgatattatgctgagctactggccgatttctgcctggcaagagcagttacccgcaggctggacgctggtcgacatcggatcccgccgcgaactgcgtgataagcaaggaaaacgggtaaccgaaattgtttatatgaccagcaaaggcgtgcgtcagccgattagcatccgccagtacgtttttggttatcagatcgcgattcaacatctggacagctaacatgatttatatttctgcggtaggcatgctgaacgcgttaggaagcaatgccgatcagattgccagccagcttcctttgggcatcgctcccggcatgaagccgcgcgatggctgggttcagcccgaacaaccctgctggttaggcgccgttgaaggtgaactaccggaaatcccggcggcgcttgctatgcatcgcagccgcaataatcaattgttattggcggcgttggagcaaattcgtccacaggtcgatcaagcgatagtgcgctttggccgcgatcgtgtggcggtggtattgggcaccagtacttctggattaaatgagggcgaccgacaggttaaccagcgcagtcacgacgaggaaagtgacggctatgattattatcaacaggaattaggcgatccggcacgttttctttcggcctatctcgaactggagggccccgcgttcaccttgtctaccgcctgttcttccagcgccagagctattatcagcggccggcgtttaatcgaagccgggctggcggatgtggcaattgtaggcggcgcagatacgcttagccggatgccggtcaacggttttctcagtcttgaatcgctttccactcagctttgccagccttttgccgccgaacgctgcggtattactataggtgaagcatcggctctgatgctgctcacgcgggagcctcacgagatagccttgctcggagtcggtgaatctagcgacgcatggcatatgtcggcgccgcaccctgaaggcgaaggtgctattcgcgccattgaacaggcgttggacgatgcggcaattcaacctcaggatgtggggtatatcaatctgcatggcaccgctacccggctcaacgatcaaattgaggctaaagtggtcaatcgcatattcggtaatggcacgccctgtagctcaaccaagcatttaaccgggcacacattaggtgcggcaggcgtgtgcgaagccgcgctgtgctggctgttattgactcgtgatttacccttgccggcacaggatttctctcattcaacgccggatgacagcttgccgtcttgtgggttactgctagagcaggagccattgatgaaggcaattgttatgtccaattcatttgcctttggcggtaataatacctgcctgattgtggggaagcgtcatgcctgaatatttaccggcgggagattatttgcctcacgcggcgccgatgatgctgctggatgaggttgtcgcggtagaagcagaaagcgtgcattgtcgggttaaagtcacagaacagggcgttttagctcctttcctcactgccgaagggcatttgcctggatggtttgcgttggaattgatggcacagaccgtcggcgtgtggtcgggttggcatagccgccagcggggcgagcgggcggcgaatttgggcatgttgctcggcgcgcgtgcgctacgcagccagactcggttgattgaaaacggaaatttattggatatcactatggtcttgctaatgcaggacgaaaaatttggcagctttgaaggtgaaatcagctgtgcagggcaggttttggccaccgcgcggttgaatacctatcaaccggatcaacaagaacttaaacaattatttcaacaggatgaaatggaatgacacgttcagttttggtcacgggcggcagtaaaggtattgggcgagcgatagccctccaacttgccgccgatggatttagcgtggccgtgcattatcacagcgatcttccaggggctcagcaaacggtagaacagctaactgcgcaaggcggacaagggcggattatcggttttgacgtagccgatcgtgatgcgacgcggcaggccatcgagcaggatattgatactcatggtgcttactacggcgtggtgaacaatgccggaatagctcgcgacggcgcgttcccagcgctcagtgaagacgactgggacagcgtgatccataccaatcttgacagtttttataacgtcatccatccctgtattatgccgatgatcgggttgcgtcaaggcggcagaatcatcacgctgtcgtcggtttccggtttaatggggaatcgaggtcaggtcaactatagcgcggcgaaagcgggcattatcggcgcaaccaaagcgctggcaatagaactggcgaagcgcaaaatcactgtcaactgcatagcgccggggctgattgataccggtatgattcagatggaagaagcatcgttaaaagaagcgatgaatatgatcccgatgaaacggatgggcgccgcagaggaagtggccgggctcgccagctatttgatgtctgatattgccggttacgtgacgcgtcaggtgatttccgttaatgggggcatgctatgacccgccgcgtagtgatcaccggcatgggcggcgtaactgcctttggcaatgactggcagagcgtggccgctgggctaaagtctggtaaaaatgcggtacgcagcatgccggaatggcgggaatacgcgggattgaataccttggtcggcgcgcctattgatgatttcactttaccggagcattacacccgcaaacgcattcgctcaatggggcgagtttccctgctagcgaccagagcgaccgaactggcgctgattcaggcgggtttgatcggcgaagcggtgctaaccaatggtgaaaccggcatcgcctacggctcttctaccggcagtaccaaaccggtcagcgaatttgccaccatgctaacggaaaaacacaccaataatatcaccggcaccacttatgttcagatgatgccgcataccgcggcggtgaataccgggttgttcttcgggctgcgtgggcgagtgattccaacttctagcgcctgtacttccggcagccaggcaataggttacgcgtgggaggccattcgccatggttatcaaacggtgatggttgccggcggagcggaagaactttgcccgtccgaagccgcggtgtttgataccttatttgccaccagtcagcgcaatgattcgccacacaccacgccgtcgcctttcgatatcaatcgagacgggctggtaattggcgagggcgcgggcacgctggtgttggaagaattggagcatgccaaagcgcgagatgcgaagatctacggcgaagtcgtggggtttgccactaactgcgatgcggctcacattactcagccacagcgtgaaactatgcaaatttgtatcgaacaggggctgcggatggcgcagttacaggcggcggatatcggttatatcagcgctcacggtacggcgaccgaccgtggcgatctggctgaaagtcaggctaccgccgcggtgtttggcaataatacgccgatttcatcgctgaaaagttatttcggccatacgttaggtgcctgcggagcgctggaggcctggatgagtctggaaatgatgaatgaaggctggtttgcgccgacgctcaatctgactcagcccgatccggcctgtggcgaacttgattacatcatggggaagccacgccatattgataccgagtttttccaaagcaacaactttgcctttggcggtatcaacacttcactggttttccggcgctggcgttaatcgatgatgcgcatcgctctggctcgaatcagcgatctcagccaacctgctgtcaccaccgattggttgtcgccggagttactggttcaggctcccagcggcaaacggcgggaggcgtggctggcgggaagagtgttgctggcgcagcgggtgggtcagcgacctctcagggaaatgatcattgaagcatcgggaaaacctgcgtttcggtgcgatcaattgccacatttcaatatcagtcacagcggcgattttgtttttgtcgccgtgagtgataaagggccgattggctgcgatattgaagtgatcaggccgcgaaccggtgcgatagagattgcccaacactatttctgtgaggctgaatatctgtggttggcggcgcagcctgccgaaaatgtcatgatggcgttttggcgcttgtggaccgcgcgcgaggcacgattaaaacaacgcgggctgagtgtttggcaaatgcgttcaatagcgttaaagcccgaaacattgggcattgccggcagcgaaatttatcattggtatcagcaagggttgagcatggcggtcagttgctgtccgtcagaaacggcaaacagcgatctcaccgtggataaatgagcgtattcctgacatttatcagattattaccgatgaacttccccacaaagcagcaccacatccgggcggcgctgatggattttagccgccacggcaaggcattcctgacgggtaggatatatatcttcagacacgggaagcgcgtcacaagcatctattccgcatgtgctgaccagtagaacaaatcctataagcatatatcccccttattcttcaaagtatagcgcgcttatcttgcgagtatagaggttttgttgtggcatagcgctcgctttaatcataaaaaatgccttactaacaaagatttccacaatatgccgcgcacggcgaattccacatggcgtaacccgctcttgggggatgttatgaataatcatattggcagccattagcgcgagacggcagtggaaggatcactctgtctgctattgagggtccatcgtctattaggattttctgctttgtatttatgccgtcaccatattggctattgtaagcgtttcattttcatcttcaccgctatgggatatcacctatgggtaaatcatcgcgtatatattctttaaaactttagttggccttagagcggagtgagcgcgcgtgtctgtggtggtaaaaagagtgaaaaggattctcactagttggagatatgtctgaaaaccattaataagataagggtttgagcttaaaacactaacgtaatggagtacataccaatgaaaggtaagttgctattagcgatattactgagcgcgagcttttcgcttcaggctgatgaaaccagctcttggactgatgaaggtcaaccgtctcctgagcatttggagatgcagaaacccgaatttcatctttgtcaggatggacaaaaccagtcaccgatagatatccgtggggagttaagaagtaacctggcaccgctgaccatgcaatattttaccacgacgctgaatatcgtaaataatggttatacgattcagttgaacgtacccaaagggaataaagtgcagttagatggcgaaacttttatgctgaaacagctgcatttccatgctcccagtgaaaataccataaagggtaagcaatatccgatggaggcacacttcgtacataaaaatgagcagggagaattgctggttgttgccgtgatgtacaatctgggcaaagaaaatatggcgctggaaaaagtgtggcagcaaatgccaaaaggattgaatcaggaacagaagatcaatccagcgttggatctcaatggcctgattccggacagcaaatattattatcgcttcagcggctcgctaaccacaccgccttgttcagaaggggtacgctggctggtgtttaaacagcctttaagcatttctgaaaaccagattacgcagtttaagtcggtcattcatcgcgataataatcgaccggtacaggagttacacggtagggttattgtaaattgatttctggatattttaatttttcagggaatctaaaaggattttcaataaaactgttaataaatcgctaagggtgaaaataaatctttatcgatatatttaatgtaatgtttcgtcagcgtaaaacagcgtgctttatttggtttatgctgacggaatcttattggatatatttatggctaaacagccagacgtctaaatgggtatttaatttatttataaataaggcttgattaaaatgattggctatgagtaaatagcgtcatcggtttggaacacagaccttatgaaagcagttttagtaaagcagttcacagtattagcgttatcctcaatagatacctcttcaccgcgaaactccttcttaagtgccccataagaaataactgaaagacagacctctcttgccttatggcagcttaaataaatgaaggaagtatcgctatgtctaatacaatgactggtttagtaaaatggtttgacgcgggtaaaggctttggttttattaccccagcagacggtggcaaagatgtattcgtgcatttctcagctatccagagcaacgattttaaaacgctggatgaaggtcagcgcgtagagttctcgattgagaacggcgcgaaagggccttcggcggccaatgttgttgcccttaaagacaggcaataacgggaagaggctttccgaccgcgatgacgggtttccctgagcagtgaaagccctctccataaaaagtattaccggtttgcagtaaagattatgtcagcagttttagttaagcagtacgtcgaattagcgttatccgaacgataccttctttgtcaatgcctctctagcgatgcccataactattaatatttctgaccgttacgccagatggcaattaaaaaacaaataaaggaagtatcgctatgtctaataaaatgactggtttagtaaaatggtttgacgcgggtaaaggctttggttttattaccccagcggacggtggcaaagatgtattcgtgcatttctctgctatccagagcaacgattttaaaacgctggatgaaggtcagcgcgtagagttctcgattgagaacggcgcgaaagggccttcggcggccaatgttgttgtcctgtaaagacaggcaataacggctaattatcggatagaaatccccggttttctatccgataaaaattgccaacaaaaaacccgccttgtgcgggttttctggttttataggaaattaaatggcctgcgctgacgatgtatatagctggaatagtggcacattaagattttgtagcagaaaccaaaaataacattgggcgctctttttcttcatccaatgccggttgttctgcaatttgctgcgccgtaggcccccattcttcaaggcgatgtagagtaaagccggcgtctatcaacagattaatataagtggctaacgtacgatgctgcttaatcactccgtctgccagccaattggtgacgcggttgccttcggcctgataatgattaaccggccatgatctttggcctttatcatcagttaaccaaccctgctggatcggtgcgctaaaaatagggtgttcggcagagaaaacaaatttcccaccgggtttaagagagcgaaaaatcgtgtcgaacagtgccgatagattaacgacataatgcaaagctaatgagctatagactaaatcgtagttattttccggtaatttaagttgttccagatcctcacggcagtagcttattttgctgtcgtcggtcatttcattggccttggccagcattttggcggaaacatcaatacctttaacttcccgagcaccttgctcgcgggcataacggcagaaccaaccgtagccgcaacctaaatcaataacgttaagatcgtgtaggtcgggtagcattttggcaatcgatggccattctggtgcgccgtttaacccctgagttgaacgattcaattgtgcgtagccagcgaaaaatgccgggttatcataaatattctgagccatatctgctccaaaagtcgttaggataaactgaagtttattattaaggcgtttttccagggcagtttaacaagaggattttaatcttaatgcactgcgccagtgggaaaataaggatagcgccgaaacagacggcgctatctgagtaataggctttttaggatttcagtagaggtcaaaagacgcaaactgaaggcttaccagccaaagcgagcgccaccgtcggtagagttgtcctgttgaccgcgttgttgaacctgctgcattcgacggtcagtctggcctttttcatttatcacatggccagaactcatatatttaccacgacattctgctgaggtcttatcgtgacactgatagtaagaatcagcatcggaagagcttgaacatccggcaactaatgtggcgcaagccagcaaaaaaactattttcaagtccattcatttccccttaaattccgtttaccttattgttgctcagtaaagataaatatatcagcaacgagaataatattacctccagtttgcattgaaatctattattgatgattagtaacggatttatctcgcggaactattacgctatttgaacgcgcaatcacagcccctatgggcacaatagggcaatatactttggtacgacgacattgacattatagaaaggggcgtttatgcaagtgagaaaagccagagtagaagaagccgaggcgctatgggcgctaagaaataatgcccttaggagtggctgtcggaacgtttatgatcaggccacgcttgcggcttttacgccagatgtcatgccatcgggatttcctccggtcatcatggtcaatccatgttttgttatagatgatgaagcagggatctgtcccgttggttcaggctttctcgatcttaaaaatcattctgtggaggcggtatttacgcgggatacctatcagggaaaaggcgtgggttcacggatactggacgctattaaacaggaggctattgcccgcggtattaataccctgaggctttcctcaacccccaacgctttggcattttatttacgccatgattttaatttgctgcgtgagggcgagtatttttcaccgtcagcgcaaaaatatttgcagtgttttgagatggaatggcggcgataaaaattgaattaagctaaatgctacattttgccctttgaacaggcgtttgagctagggagttaaattcctcagcgccgtgtctgtcactaaaaaatgtagagataaaggggtttaacactgccatatccaaaatttttattcttttattgtcaattgattagagcagttttggcagcagactggttaatcaactaatcatattgcttaaatagacaatttggcatatacactcacgcaattttataaattattaaaaattgctgagcgctaaggctgattgttaaatgaaaagtatagggatagccatattaaccgggatgttgacgttgggaagcggtgctcaggcagctgaaactcaatcttacttcttcgatggcaaaatgctggctcacccggttatttatggtgccagagaaggcaccgccgtgatcgcctttattaaagaggccaatggggttaacggatattattgtctgtgtgaggacgaagctaacccggatcctacacagcgtacgctggatcgttttggccatgccagtattgagtcggtctttttcttcgatatggataacgctggcccgctgaccttggtattaagtaaaaccggcaaggcctatcaattacgagcttatcgctattgggagaatggtcgcggttttgttaaagtcgataaattgcagtctgccctcgataagattatcagcaatcaaaaagcgccgacggcggtgatgattaaaaccgcattagctaaattgacgccattcgacctcgctataacttaccagccgaccggaattgcggaatttgacgcgatcgatcatttgcaggggaaattggtcagctactttaatgaagacgagcaacccatacctgaacctaaagatctcttctctaccgacgcggtattttataaaaaacataccagcaaaaagaagggcttttcctgactgttacttatatccgctgggtatttagcgaagaagatgcgcgcccaagttaccatattgccagaatgagctgggaagccgatcctaaacaatatcgcggtactgaagatggcccatatattgtctatcaaatgggcgaaattatgacacgcggacaatataaacaagggaaagaaaccggcgaatggagtatcaataacggcgaacaggagcaattattcggcacttatgtttacggcaaacgccacggtaaatggaaaatcatcgggcgtgaagcaagtcgcaccggcatgatggtgaacgacaaacgcgaagggcgttgggaaattagtgacggtgaagccagtgaagactatggcctaacggggttcgatacttttgttaacgatcggcgtaatggcccaagcgagagacagtttaaagggaagattactgagcagggaaactacgtaaacggtgaaaaagaaggtcactggcgaatgcccggagcagtcggcagctatttgcacgacctcagaaccggcgattggcttattttgaccgaagacggcggtcgcgaagagctagtgctgagcaaaggtcaaagggacggggcatatcgtaaatttgatgccaaaggccaactgcgggaatattctaattataaatctggtgaattatccggtgataaagaagtgtacagcgagcaaggtaaattactgtctcgtggtacttatgcacacggacaactaaacggacgagaaattgtttattacgaagatggcgtgacgttacgtgcagatcgtggatttttaaatggagaactgcatggctccttccgctataacttccctaacggtaagcctcaagaaattgctgattacattcgcggtagaaataccggtatccgtcaggtattcaatgagaaaggtgtattgctgattgaggctaacatttgccaattcagtaatggttttgaacaaagcggctattgcggacatcagcgcgaatttaaccccgatggcagtccagtgagcgataaagattatctgtggggacgtcagcaaactaataatagctggtaccccaacgggcagaaaaaagatgaaaccctgctaggtaaaaatgattcgcgtattcagactagttattatccgaacggtcagattgaatgtcgcgtccatctgcaaggttttgaagcttttgttctcgaggggaaagagtataaggataatcagggggctcatcgagagggcgaaaatatctgttattacccaaatggacaggtaaaaagccgcggaatctataaacaaggcgtggttgtaggggggtgcgaaacaaagtttgatgaaagtggtaagcaaatttcccccggcccgcaggggtgtcctaaacatacctgggtttacgaaagctaattaaagctaactattgatacgaagggcggcgtttcgcccaaatttgcctctggcatttatcttagcggtgatgccttatttttcgtggctcactgctaacggataccgagaacgaattcagatgaatggacactcctttgattgatcaaaattatcagcgctggttattgacgctatctgcgcctttggttgccctgaaccaggaacagggggcggcctatgattgccctaaattctatccttttgatactacggtagatttaaccgagagctggggcgtggataatcgcgaggaactgatcgctatggtcgttcggatgaccgatgacggccacgcaccacatttggcaggttattatcatatgtggcatcgctttagccatagggaatggcaggattacgtggctcaacgcaccgggcgagagcaggtttggctcaatctggtcgctgagacggcggcaatttgcggtgaaggaggaattcaggcctgggatttggctcgcgtcagttttttatgccgcattgggctgctcaaccgttggattaatgaagaggaaaatctgtggttccatacccaatttgcttcacgcgctaggcattattacggtgattgggaaagttattataacgcctttctgattggccgagcctattggttaacgcaagataacgacacgccggaaaccctgaattttgccctcagtcaatgcagcggcacggcggctagcatggagtatgccagcgaattgtatctcacccgaaacccgacttttaagcgccttccgtggcaaatcgaaataatcgaaatagaacgaccagaatctttacagggagtgaatctgtgatggagacaaattgctgggcactgctgggcgtggctccaacggaagatcaggagattattcaggcggcttatcgtcagcgtttgcctgacttccatccggaaagcgatcctgaagggtttaagcgactgcgtgcggcctatgatgaggcgcgccgctgggcggagaaaccggtgatttcccgttccctgtggaaccagaataatgtcacagagagtgaacaacggataagcgtcatcaataatgagtcagattctgaagaagatgaggacgacgacgacgatgagtttatcgatgaggattatccggcgattcaacgtctgctgagcgaattcgatgagctattagtcaatccgaccgagcgctatcagccggagagctggcatcgtttcatttatcatcttgatcaatacagcgtgacaatagtcgatcgtttacgttggccgctgttagggcgcgttcaccagggggctgcgctttccgctaactgtgtccggctgctggcggaacgtttgcaatggcgcaagaggctagatgaaatatcgttacaagctgcggctgatatggatgcatttctaaatcatatctatcgtgaagatatgttcgatttttccttgctgtcgtcgatgagtttgcccgcacaggtggaaactgtggtttatttccatcatgcgcgccagctttattgggaacagcctgccgcggcgttacggcgctggttgttgatgccggtagcgatattctggccagattgtcagcaattattacagcaaatggctcgttggttcagtttagccgaaatccccagcccgtggctgcgggacctttgtcaggcaaaactggcagaatctccgcgagatgcggactggctgtacctgtgcgctcgccatgccaatttactgggcgacggcgagcaggcgatagctcactggatggccttgtatcagttagatcaacatgctgaagccgagcagggcatgttgtcctggtgtcgccgcgagcagccggaaatgttgccattgctgattcaggcgttggatcgccccagttatccggctgatacctcgatggaaatcgatgacgatgagcagcaatatctgaggccgacccaatcgattcagacgcaggtgcgttggggaaatgcatcgcagctgacgttttctccgcaaggggaagcgctggtgaaatggaaatcgggcgcgcatcggttagagagtatgtacccgcatttgctgaataatcgcggtgagaatgagatcgaccgtttgtattggcacgccagcatgttagcactggggaacgaagcgttattacaggatattctggatgaaccgcagccggattcgccgctggcagccctgattttacatggattacagcgacaggctgcccaacgattggattggctaacacattccacagtgatcgccgggttaattcattggctgaatagtccgcaggatcaaccaatgccgtcaatattgggtcaggaaacggcgatccgtcagtgccaaatgtggttgtggcaatggcgtcatttacctgcgttgaatctcgcacatttatatgaaagcgagttgtaccagcccaaactggaaccgattaaggattggctcacattcttgtctacaatggataaaatcgagctacccgcgccgcaaaatatttctcatcgtgatgatttccgtcagggtatcttgctgatattgatgctgggatttgccgatgatcaaatggcgacgatctgtcaggctgattcacgccttctaccgccgcagcacttggctttttcgctgtttcgagcgtttaaacgagtcgatttgactcggggcaacggggttgagcagttaaaacatcagttacgcatggaagaccggctccactatctttgctggacgcatttgccgctgacggtggatgattatgtggctcactatcagtattgcgcgcacgttagcggttgcgatttttatcaggctaagtggcagtctctgatggcgcaatcgccgatgcctcataaatcattgctgtgggctttcttctcctaccacggtgtgcatgattatgtggcagcgttgcaagagcaacagacggaaacccgggatgaagcggcgtttaaaaaaatgatcgtggatatcacgccgccgcatctggaatctaaaacagcgttactgaaggaaaatccacgcttactgagtctggctaccggtaatttccgtttttatgacaacccggactatctgccggaacaatcattgagcgatgaatggctactttgggcgcaagatgaagaggaagatccggcgctgcgattaaccgccattatgttggtacaattagggcgagagcgtttagccggtttcaaaaatgcgccgcgtcaggtgagtcgcttttggcagttctggcgtttgaaaacgcgcctgggccgcggaggattagtgaagcaagtggcgggtggaaccctgctgattagcttggttggcgatatagtgctgctggatactttgcctaatacgttgctactttctgtcctgatggtgggaaatctgtttagcggtctgactcgtcgcgccaacgatctcaatcaggaatccccgcgccttcaggctttggtcagtatgctaaccctattcccgttgctgctgtttttcttcggtaaaagttatcctggatttacccatagcgggccgccagcgggcaatggcgaataaccgaggggaggcaccgtcgcaggtgcctcccgcgttttcgtctctgctatcgcggcatagggcttaagtcgcaattcgcttaagttacgatcggtttaagctacatatctcgcttgagtcctaaatggtttatagctgcatatcgtcgagaaactgttccaatcgttgacgaatcggcgcgataacctcttcatcctgcccggccaacaccgtctcgaactcccgtaaccaaatgccaatttgcctgcgcgggtcacctaacgtctgcgcccaggctttctcaatacgcgctaataacgcccgattgtgcagactgtcgcgaggatggattttcaggcagttgagacgttgatggctttcccgacgctgctgctctgtcagtccggttgggctatggtcgatgactttgctaaaagtgccgccgctgtctggaatattcacgtccacctctaacaacccgttgatatcgtaactgaagcgcacatcgagagattgcaagcgtccgttaggctgaactggaacttcaaactcatcgataaagatattgttatctacgtgaggactttccccttgataaatggcaatactgatggctttttgattcggatagcgagtggagtaagtctccacccgcgaagtgggtactacggtatttcgttccagaatcggtgagaaaataccgctgcgtttctcctcggcggtagcaatacctagggtgtaggggcacacatcggtcaaaataacttcttcgatatcttcattacgtaaacgacaggcggcctgcgcggcggcacctaacgccacaatagtgctaggatcgaggtgctgatgtggcagtttgccgaataaacgtaccacgagtttctgaatgatgttcatccgtgatgcgccgccgaccaacaccaaatgatccaactgctgtggctgcaaacgtgcatcgtgcaacgcctgttcgataggcgcccgcaggcgattgatcagcggtagccagatgtcttcaatacgtagctcatccagagccatacaccaatgcttgtcttgccagtgccagcttaattcgtagcgggccgtttgcccattgaactgatatttcagctgttcggcgctgtggtagaggcgagacaaatccgttgccggtatcgattcggcagacaattgccactctttcagcgccgcatttatcaacgcctgagtgaagtcttcgccccccagatagttgtcaccggcggaaccctgaacttcgatcagcggtaatgcgtattccagaacggtaatatcgaaggttccaccgcccaaatcgaacactaaagtgcgcccgtgattctgagtatgcaaaccgtaagccatggacgcggcggtcggctcgttgatcaaccgaaccgcattcagccccgacagctcagcggcaaaacgggtttgcttgcgctgttcatcactgaaataggccggaactgaaatcacaacgtcgctaaccggttggccgagatagttttctgcatcggccttcagggatttcagcaccagagcggacagttcgggcgcatcgaagttttgctgagccagtttgaactgctttttgctgcccatatagcgtttaaacactgaggctgacctttctggatgagtggtcaggcgagaaagcgcggcgcgtcccaccaaaatagagccgtcctcgtcgatactgaccaccgatggggtcaaaaactcgtttaaggcgttgggaatcagtaccgcttgcccctcttgccaaacgctaatcaggctattggtcgtgcctaaatcgatgccaatggctaaaggcgcgcgctgttgttccgtcatgttgattatctcgctgaaatattagcgttaaattcagggtgaagtttcgctgggcatggtgcatgcccagcgctgtgctgacaaaaaggggctttcgctaaaacggataaaaacttaacgctttttgaggaactgaatattctgtgccgttgtatttcaacagcatactgtttttcctcactttgacttctttatcgacacagttatcttcttttaataattcgctgcgacgggaagtggtgaccgaattgatttgcagatcgttaaagccgtgagtctgggttttagcgacggaaatcgtgcgtttatcttcggaaaattcaccggtacagttaccgtcccattcgccgctatattgatccatctgcaacggcttagttaatttattcagtttgccatcttgcaggttatataaggttaatacgtagtccgcgattggattaacgcgcgatgaaccgcgatggtaggtgcgtatgccgaaggcgcggttctccgccgttaattgatagcgtgcggtgtcaatgctaatgttatcggtataaatcgcatcatcgctgatggctttttgatcgtagcggtgagcgattaacttaccggtagccgaatcgaccactaatacatcgacatcataagtcggttgatcggaatactgttcgggaatatccgaaatcagggtcatcacgacaatagttttatccggtgcatagggccagactttacagatgttcaggtttgacggcgctagcgttaattccggatgtagtgttttcgccaattgaggaataaagctctggcagtccgccaacgaataagatgaaaacataagtgaagaaagaagaaggaaaatcctgcgcatagtctgagtccctgacgctagccaaataaaataggcaacggtagaaagagtgtggaaatcaccgatacacggtaactcactgaaataaggtaactaaatgctacctgtctatggattattacacggatagagagagttacctaacggcgtaattatgaaaggggaaatattttaatcgaattttttatgccagatggctgtaaaataatgcggtgctttattaaccagaatacgtcaggttgcgatctgaaatttattaaaaccaagccaaggttgggttagttagagtatttagctagcaataagctttttccagcgtcaagattgtcttattccgcaaggaaagacttacgtagagcagaaaactgtattagtgtgatgagcctgctgttagagcactgaattgtcacatttcgccgcccatttatcgggggcagaataactaacgtgccggggttacccaaaagcagaataacaatgttgctgtgcgaattttagcatgactttacttatcggttggtaatgggttgaagaaggaatctggcgtgacgaaaatacgggttggggtcatttttggtggcaagtcggctgagcatgaagtgtcattgcaatcggctaaaaatattgttgatgccgtagatacggaaaaatttgaagtcaccttgttaggcattgataaacagggccagtggcatattaacgatgcgtcgagctatctgttacacgcggaaaaccctgcgttgatcgccctgaatcactcgaatcaaaacgtcgctttggtgccgggccaacgacagcatcaactgattgatgcaagtaatgccgcagcgttgacgcaactggacgtagtcttccctattgttcacggtacgctaggcgaagatggctctttgcagggcttgcttcgcatggcgaacattccctttgtcggctctggcgtagtcggttcggctgccagtatggataaagacgtgaccaagcgcctgctgcgggatgccgggctgaacgttgcgccgtttatcactttaacccgcgccaatcgtcaccaatacacttttgagcaagtgcaggagaaactggggttgccgctgtttatcaaaccggctaatcagggatcttccgttggggtcagtaaagttcgtaatgccgtagaatttgcccatgcggtcgagctggccttcagttttgaccataaagtattggttgaatcggctattgttgggcgtgaaatcgaatgtgcggtattgggaaacgatcgcccgaaagccagcctgtgtggcgaagtggtgatcagcgatgaattttattcttacgataccaaatatattagcgacagcggtgctcaggttgtgattccggcggttctggagccacacatcagcgataatattcgcgccgtagctgtggaagcgttccgtactctggagtgtttgggtatggcgcgtgtggacgtgttcctgacgcctgataaccaaattgtcatcaatgaaatcaatacgttacctggttttaccaacatcagtatgtatccgaagctgtggcgcgccactggcatcaattctaccgagcttatcactacactgattgaactcgctttggaacgtcatcagcaggatcaggcgttaaaaagctcgatttcactgagtgaacaagcgaaatagcctctatttatttcacctatgatgatgtgcgataggtgaaatggaactctgtaaaaagctgcctggtgcagcttttttattgcctaaaaatatgtggacggtaattattgtcagtatttgacattatgtcacttaatgacaataattcagaaatgaaacttacagaagaccagctcttacttcgagagagcaaaaaaattgtcgaagccttaggaaacacttttgcgccgctggtggaattcgtgctgcacgatttaacccatccggagtacgccattgtggcaattgctaataatttgtccggacgagaagtgggggaacctgctacagaactggggttgagccgcatagccgatcctaactttcccgaagtgctccaaaactaccccaatcagtttcccgatggtcgcccagccaaaagcacctctatcggtttgaaaaatagcaaaggagagtttattggtgcgctctgcctcaatatggatatttctctgttctccgccgttagcagcagtctggcgcagctgacgcaaacgttgcccaatgacattcaggaaaatctgcaatccccgcgtttggaaactctgcgtgcgcgattggaacaattcgccacggcctggaacaccacgccacgcggcctgacgccggctcaacgccgtgaagtggttcggcaattggccaaggaaggattgatggatttgaaaaatgcgcaaacagtcgtggccaacaattttggggtcgcgcgctccacagtttatacctatctcccaactgatgaaggaagttgaaaatgccccggctcgcaattggatatgacgatattgtacaggcacatcaacgtattgccgatgaagtagtcaaaacaccggtattcacttctgccacggcagacgcccaaaccggagcgtcgttgtttttcaaatgtgaaaattttcagcacatgggcgcttttaagtttcgcggcgcttttaacgctttagcgcagttaacaccagagcagcgagagaagggggtcgtcactttttcatctggcaatcatgctcaggccatcgcactggccgcgcgaaaactgggcatccgcgccaccatcattatgcctattgatgcgccagcggtgaaaattgccgctaccaaaggttacggtggcgaagtcattctctacgatcgctataccgaagatcgcgatgcgattggaaaacgattggcggctgaacgaggtttaacgctgatacctccctatgatcatccccatgtaatggctgggcagggcacggcggcgaaagaactgtttgaggaagtgggggacctggatgtactcatcgttcctttgggcggtggcggtctgttatctggctgcgccacggccgccaaggctttgaatccacactgtttggtgatcggcgctgagcctgaagcgggtaatgacgggcagcagagctttcgcagtgggaaaattgtgaaaatcgctacgccgcacactattgccgacggtgcgcagacgccatttctgggaaactatacttttccggtgatacaagaacgagtggacgacatacttaccgccagcgacgctgagttaattacaaccatgaaatttcttgctagtcggatgaaaatactggccgagcctacgggatgtctggcggccgctgtggcgtttggggaggcgctggacctgcgcggcaaacgggtcggggtgataatttccggtggaaatgtggatctcagccgctttgcccacttcatccagcaggaaaattaatctctgatattcacctgataaatcttaatagaaatccgccgccaggccatgacagccacgtagcctgcgccgacggccgggcctatcttttcggccagttgaccataattgctctagggaaaccgttgacgaatcagccagttgaatctcagttggcacaggtattcgacaatatagatcgcgtactgcttagttgtggctgcgattgcagtgcgttgatacggattcgggggtatctgaacgatgaaggattgtgcttgcaattcaatcaattatacgctcattgtttaggggaacatcggtcagtgcgttgcgtagtacccgtagccgaattgcactatggattaatggtcgaaattaaggccattgctcaataagtgcactaaatattgtacctgtttataaataaggttgggcgccaggcgcagatgagtaggactggcatttatctttatcatcattttattttatctatcatctgtttttccatagtagacggcaaaacagatgcctctccccgagtctttatctctaagatttttatcgtcagttaatttataaccaattgtaaataaagctatatttttttgtttttttaatggctggttatgatgaagtcgaaaccctttaattttgactgccctcaatgaagaaaatagagaaagtttcattagtgtaactaaagtgtttattgcgggttacaatcggagctgcaaacatgatgctggtcatcatttgcgcatttcgcattattttcctgttgtattttatccaccatataaatgctgtgcatatatacagtatattgctgtacacataatgaaaattaattcaaggatgagtaatatgaaaacttcaacaaaaacacagtaccctattattttagtacacggcctatttggttttgacaaaatgctgggctatccctactttttcaaaatccagccagcattggaagttgccggtgcacaagtgttcactgcgtcagtttctgcaaccaattcaaatgaaacgagaggtgagcaactacttgattttattcgatatattttgaataaaaccggagcgaaaaaggtgaatctcatcggccacagccaagggcctttagcctgccgttatgctgccgcgatgcgtcctgacctggtggcgtctgtcacttcggttaacggtgtcaaccacggttcagagtttgccgatcgggttcgtgaagcctttgtcgaaggtggcctgcctgaatcagtggctaatttggttgtctctacattcacaaatttaatgtctttactcagtggtcatccagaactgcctcaggatgctattgcgtcactggatgcattaaccacgaaaggcgttacggaatttaacgccaaatatccgcagggtctgccagagaaatgggggggcgaaggcaaggaagttgaaaacggcgttcattactattcatggggtggatttatccaaggagggattcttgagcaagggttgaatacagctgatccactgcatatcgcgatgcgcgttggttcacaattctttattagagaggcagaacagaacgatggcatggtagggcgttttagtatgcatttaggtaaagttattcgttcgaattattcaatggaccatatggatgcggtcaaccaaacggctggcgtagtgccagtgcatcttgatccggtgaaaatgttcgtcgaccatgcagcattcttaaagtctaagtctctgtagtccacttcgactgagatgaaaaggggagcgttgttgttaagtcacgcaacctgattagtgacgttgtaacctaatcgctcaactattcaactcaaccataaaagagaaataacagagactcccctgcggccgagaaggagtctctgaaaacgattacaggtgttttttcgcgaagttaacaatatcttgcttaaagtcgctgaccttcttctctggtgatttcttacataactcaaccaccttcggcgttacaacggtatcaatttcttgatagtcaacgaaatcgccttttttatattgcgtatcgtcattcaacatccagaatacgaccggagtgaagcttttcgggttcaggtcgataaactctttacagctcatatccgctggcgtagtcgggctggtagcggcagcaaatgacgcggtggctgcgcacagcagcaaaccagccaatgggatattacgtaatgatttaaatgacatgcctatctccttgcggtttcggatcaataatttccaatataactcaggttctggtttatatttcgagtctaagcatggaccaataatttaaattaggccagtaattcacttaatttatctgttgcgccattcgactacttatcctctacagtaaatattcaatttatagttatgcgtcgatattatattaattcgcatggttattattgggtttataatttgatttttatttgaaattggctaggagattatttttatttgttagtaaggcttattacgttgttttcagtgtgatatttaattcggataagcgtaatgccaggctccggatgctattattttacagtttgaactgaggtgagaatagcatggggtgggaaacggaagttctaaatttcaataaacggactaaaggtaaatcatgaataaagaaaaaccaaacatggcactgatatttatcattttacttacagtgagaattcatgctgaggctcacaacattaataatgtcatccctcgttctgataaccgagaacacttatcatcgcgcgtattggaagaaagtaatcaggctgtatctctctataatattggtagcggcacgttggtctacagttccgaatacaaacaaaaagaatatctatctgctgattatgcatataatcttaatggaggatggaaagaaaatgcaaactggaaatatatttataataggaatggtacggtatcatttaaaaatagatactcaggactatgcctacaatattacgggacagaatatcaggtcattgaagatacctgtgatcccttattgagaactcagcaaatcaatctggaactggtcagctctggcggaatgcttatgcggtttaatagtaataatgaatgcctttatattcatcctggcatcagccattactatgtatacagtgataaatgcgaagagatcaatttttatcattactggaccatcgtacctccgctcaataactgagtgaatccacagggagtgaataatgaagagtgttttatctaggatgtttgtgtttggaggcttgtattggtcaacgttattatcagcctcagtgacagactaccaattagcgacctggaatattcaaggcgcgggcagcggcgcggccagtaattctaaatgggttagcggcattgccaatatgtttttgcgtgaaaatatccaggttgttgccattcaggaggcgggggccagaccgccttccgcatgcccttatcccagtccgggaaccccaggaggcattgatttacaacgaatcgccggcggggcaccaaatagagtcaatccacaacggcgtggtgtgatctccgacgttgaagaatcgctctggcaacccggcggacgacgtggcggaaatatttatatctatcatatagatcatgataccaacgcgcatcgggttaatattgctattgcctcgcggattcgggcggatgaagtccttattattcctccgttggaaaccgggcctaatgcacggccaacattaggcattcgaatcggtaatgactatttttttagccttcacgctggagcgcatcaacataatgaggctgcgatgattgtgcaattcattgataactatatggctaacagcgtattaccgcggcgtgcggaggcaacttggatactcatgggggattttaaccaatcgccggatagtttacgcgccagcttgtcattgcctggcactacgatgctgaatacttaccacgttgttgatcccaatgtgccaacgcatcagggggggaatacgctggattacgccgtgctgggggctgcaaccggtacggttaggctgtttgccgtcccgcttatagctgcgatgatgacttatatgtccgatcacattgccgttcgatttaatcaataataccgaattaatacacaagactgttcagaaaggcgcttagaatctatgggctaatctactttaatatgacggatagccctttttttaaattgagagtaacggttgttaaagttaataatgttggatttacgaaatatatcactactgtaatgtttaatgctgtaattaatactaaaaatttctcaacaatacttatttaaacaaagtgtagtaataatggcgatggaagaataggttacgttagaccatttaaaaagtaaggcattagcttgggtgtaacatattgattatagctatcatatttataggtaaaaacaattctattatttctcacaacttaccttgttctcagcatccctttgggttctataaaaaaacagtcacctatgctatcatttacagtaattatcattaataaacttaatgaaacgttattgttttatttacatctttaaatataggtgagttaattttatgagtttacgttatttttaccgaaatagcctgcggctcttcgccaggagattagcgggcaactatcgtaaaagtgatcgatctcataaacatgccggtaatgatcaactgattaatctgcatttggaatcactgcttaatgctgcaactcaggtagcgattatcacgaccgatctggataatcgtatccagattttcaacgctggcgcagaaaagatgtttggctatgaaaaggaagaagttttaggaaaattagcgacggaggttatctatgtcgactccaacaaagccgagcaaagctgcgtaaaaaatctgttgaagaaccaacctgaatcaagcgaatggctttatcgacgcaaagacggtgatgctttttggggcgatttaagcatacacgttattaataatgagtataaagagcccattggttatgtcagcctgatctcagacatttccgagcgtaaagagctattgataaagctggaaaacagcaaaagaataatggacaagttgacgcgaaacatcccagcgatgatttatgcctatcatctcagtgaagcgggagagtcttattttaagtattgtagtgacggtatccataaaatattcgggttgtccccagaacaggtgacgaatattccgaaacaagataatccgatattctcgctgattcatcctgaagatatggccatgctgcaagaagaagtcatggtttcacgccgtgatttatcggtttggcgctgtgattttagagtcatattgccggataaaggaatgcgctggcttcacggcgaatcttttcctactcgtcatgatgacggatcgacgatgtggtatggctcgtttttcgatataactgaactgaagcagtctgaatcaattttaaaagccttagcgcagacggatgtgctgaccggcgtttccaaccgtcgtcatttcgatgaggtttaccatcaaacctggaaggtcagtcaggtatccgaagagtctctttccatattaatgatcgattttgataacttcaaaagctttaacgatcagtatggtcatgctcgcggggatatttgtttaaaactggtggtggagaccttgtcttctttcatcagagaaaataccgatatgattgcgcgttacggcggggaggagttcattgttctgctatcaccaagcaaccatgacgaagcgcttctggttgctgaacggatgcgcgattctattgagcggttggatattcctcatgcgatgtcgcccaaaggtaaggtgacgatcagcatcggcgtggcgacgatggttccgaagaaagagggattatccgccagcgatatgtcggatattgcagataaagcgttgtatcgggcaaaacaggcgggtaaaaatcgtgtggaggccgtgtcgctctgaggcgaactgaaaatgcgaaactggcgttgcgtcaggcggagagaaaatatcggtttgagggaaataaatggcagagcaacagggagtgctctgcccgtggtattaatcaggatcctgagcggcgcgcagacgttcctgctcttctgcaatgaccgctttaatttcttccagcactgactcgacatccgctgcctgagtactttctgcaaacactccggttagctgagtgtcaggacgaagtttgccatcttcatacagcgcccacatttctttggcatattttcgccctaataactcaggcgcatactggccgtaatagttggtcatgttggctacatctcgttccagcatggatttggcatggttattggcagcggcgttaacgacttgcggtagatcgatgatcaccgggccttccgcatccattaacacgttgaattcagacaaatcgccatgaactaacccggcgcacagcatgcggaccacggattgaatgatcaaggcgtgatcgtgcaccgcctgctccggcgtgagaggaacatcgctcagacgcggtgcggccgagccgttttcatcggttaccaactccatcaacaatacgccgtctagacaggcatagggctgaggaacgcgcacgccggcgttggctaacacatacagagcgtcaacctcggcggtttgccaggtttcctcttgctgcttacggccaaacttcgagcctttcgccatcgctctggcatcgcgactgtttctgactttgcgaccttcctgatactgtacggcctgcttgaagctacggttttcggcttctttataaactttggcgcagcgaatatcggagccgcagcgaacgacatagacgtcggcttctttaccacttttcaaacggcggatgacttcatcaaccaagccgtcatcaaccaagggttggattcgttttggaattttcatggcgtccttttaccctatttaagcccgcgatggaatggttttggtcgaattttcctccagtttaccatccgccatctaccgcaggtggtatttaggggatcaggccgcgttaaattgcgcattgtacaatcgggcataggcgccttgctgtcctaaaagctcctgatgattgccttgttcaacaataccttccttatctaccacgatgattcggtcggcgttttgaatggtggccagacggtgggcaatcactaacgtggtacgaccacgagatagctcaatcagcgcctgctgaatcgcctgttcggtggcggtatccagggcagaagttgcttcatccaaaatcagaatcggcggattttttaggaagattcgcgcaatggaaagacgctgtttttggccgcctgacagcttgacgccgcgttcacctacccgcgtgtccagtccatcgggcagggcgttgatgagttcatccagtttggcctgttgggccgcgagcatgatttcgtcatcgctggcatccagtttgccgtaggcaatgttttctcgaatggttccgccaaacaggaagacatcttgttgaacaataccaatgttatgacgcaaggattgctgcgtcatagtttggatatcaataccatcaatggttatcaaacccgaatctatctcgtagaaacgtggcagcagagagcatagggtcgttttacctgcgccagacggcccaacgaaagccacggtttctcctgcgcgaatacgcagattcaagccggtaaagatagggctttgtggcgtataaccgaaagtgacattgttataacaaatatcaccttttaaatggccaacctgctgtgcatctgggctgtcctgaatgtctggtgcagtatcaatcaactgggtaaaacgtttaaaaccggcaatccctttcggatagctttctaataccgaggtgattttagccaccggccggaagaagacttccactagtaacaagaatccgacgaaaccgccgtagctcaattgcccctgaatgacgtaccaggtgccgaaaaccatcacgatcaactgaaccaaacgggtactcagatagctgagcgtcatgctggtggtcataatgcggtaagcacgtagcttggtggtacggtagttttcgttatctttagcaaacagtttcttttcgtgagactcatttgcaaaagccttcactacgcgaattcctccgatgctttctccgattcgcgcattaaaattgcctacctgaccaaatagttttctccatgtatcagtcatttgcgaaccatagcggctgaccatataagtcatacagggcacgataacaatggtgatgagggccagaggcagatgcaccatggccatcaggataaaggccccgataaaggtcatgattgcgataaacaaatcttccgggccgtggtgcgctatttcaccgacttcttctaaatctttagtgacatgggtaatgatatggccagtttttgtattgtcataatagcggaaagacagtttttgcaggtggctaaacgcttgtcggcgcatatcggtttctataccaacgccaagcgcatgaccccaatagtttacgacggccatcaaagcagtattcaacaaataaattaagagtaagccggctgcggcccatagaatcaatgaccagttctggtccggaagcagtttatcaatgaaggttttgactgccatagggaagcctaactccagcaaaccagccagaatggcacaaccaaaatcgaggaggaaaagccctttatacggcgtgtagtaagcgaaaaaacggcggagcatcaatgcttccttaaagtcggagagagacaaatgggtgagttagtgaataaatggctcattaccagttcgcagcataataaatttaaatgattattaatagcatcggttcccacagatggcaggttagacggaaagcgtggagttggatatgctagccgggcagacaaaaaaagaactgggtaatactgccgcgtaacccgatattatcgtggtggttacgcgatggaatcattaatctaaactgcaaaaaataataaatagaataggaagttcttatttgcttcccgcccaactgtaaggctcaagctctacgtttaacggcggctgggctaagttattggcaaaattagccaacgttgccaggcttacgccgaaaatgacttccaacgcattctccatattgtatccggcttgtaaaaatgcctggtattcaggttcagagacatttccttggctacgtataatggcccgcgtaaatgcggcaatcgcgtttaaacgatcatcggctaaattatcgccctgacgtaaagcttgagcaatatctggggcaagcaaatcgtttctatcaataaccgcgcagtggccagccacgcaaaaatggcattcatgagccgtagctgaagctaatttaaccacttcgcgttcgctttgattaaggtctgcgctgccgttgacagccgacatttttgtataagcattcaataccttgggcgcatgagccaaaacgccaaataaattgggaataaaacccagctcattatttacatgttcaaatatagggcgattttctcggctgacggttttaatggtatagggtgttaggcgattcattattggcctcctgtcgtctttcagatctactatttttcacatctactaataatagatgaagaatgccggttctttttttaaataaactacatatagcatttttagattgttttagttgtcaagctattagcctattaaaagtcacctgatgtgattaaattttgtcggcgaaactattaattaccataaagtgcaaattagatgactatcgtcacgcattggctcatttttatccgttgcagattcttccggctattgagtattgttaatgcccaatgatcaggagctgaataatgaaactagaattaaccgatgcaccaaaacctgaagatattgaggctattagtgacggtttgagagtttttaatcgacgttttgttggtgcgcaacgcagaaatcccttggcggtatttattactgatgacaatggcaaaaaccagggcgggctgaccggttataccttaggcctatggctaaatattgaaatgctgtgggtctccgatagtgtgaggcactctgggatgggcaccagattgattcaaatggctgaagaagaagcggttaaacgaggttgtcagttttctcaggttgatacttttagcttccaggcgcgaccattctacgaaaaacagggctatcagctacaaatggcgttaaataattatctggatacccatcatcgctattatctcacgaaagcattgtcagttagttagggtaaatcggttgagtatccgaaatatgtttttggcgtaatgatcgtgccgacagggatcaaaacgataacctttgcgcctcatcagaatcgaaaggttatatacggtaagtgatcccgtcggcattggggggaaatgcagctactatatcgacagccttatttgttcgataagtcgtaatgctgattcttagctaacttaagactggggctgcgctttatctatcatatggaaatcgcgtagagcaacgtagggatcccaatattctttgacgttttttaactgaccgtcgggtgaaaccgtcacaatactgataaagttctggtgataaggctttttatggtttttcgattttttatcttcagatgtagcggaacgaataaaacctgaactgctgtattcgaacacgtagactccaggtttatctgtcgctaattgggtccaggtttgaggtttggaataacgtaagtcctccagataggcacttattttagtgaaataggccgtcatcgcttcgcggcctcttgaacctcgcgaaaatattgggaaatcatccaccggcgcataaaccaattcgaactctccggcgggcgtaaaatattttgcgacgttatccggattttctgaccaacgattcaggctttgccaaaagaatatggcaacatcttcagtgctatagcctgggagcagatagtatttaccctctttacttataatatgatctgacagttgttgtgcggccagggcggtagaactggctgatattgcggtgaagatcaataaacattttattagcttgctcatgagaaaccccactattttgtttagacagccagatgctgcatttttattacggctttaattgtgctgccagactgagagtcagccatggcctgattaatttgatccagggcgtaaaaacgtaccaatttgtcgacaggaaagcgtccctgctgaaataggctagccaatcgcggaatgaatgatatcggtgcggcatcacccataatggaacctcgaaccaaacggccacgtagtaagtgcataatatttaatggtaaagtggcatttggtgcgaccacgccggtcaggacgcattggccgttctctgccagagccgcaattgcgctttccatcactgccgggctacctgcggcctccaccacgtagtccactcctcggccatcggttagttcttgaagcagcattgggaggctatttcgcgtgcgatcctttgaggaatcgatactgtgagtggcgcccaggctttttgccagcgtcaaccgattggctttgatatccacggcgataattgtggtacagcccgctaaaactgcggccatgatagcggcaagcccaacggcttccatcccgaaaatagctatcgaggaacccgcctcaggtttcaggctatttaagacggcaccggcgccggtcatcatcccgcacgccagcggccccaaatattccagaggaatggttttatccacgggcaccacgctgcggacatttaccgtggcataattggcaaaagacgattggccgaaaaaatggctatgaatggcttcgccactcgtggggtcttgtagcgaaaccgatttatcgctgcgactggcgtgccagttaagtggccaatgttcacggcaataggtcggtaaaccgatatggcatttttcacattctccgcaggaagcaagcgaaagcacgacgtgatcgcccggttggatatgcttaacaccagaaccgacgcgttcaacaatgccagcaccttcatgacctaaaaccgcaggcagaggtacattgatcacttgttggtgcgatgcaatgtcggtatggcacaggcccgttgcaataatttttaccagaacctcattctctcgcggttcctccaaccttaattggcggatctggagcaaagggttactctcaacgctaacggctgcatgaatattcatagtgttattcctaggtcatcaatatctgatcagaatctttccacgtatgccaccttggcgtatttgctccaacgcggcgggcacctgctctaagccaatagttcggtcgaccacgacctgcagcgtgttgttcgccagtttttccattagcaggcgcaggtccgatagttcgggtttcatctctagattcaccaggcgaatatgctgggacatcttgagtgacgcggaacctatggtactgatagcggtaccctgcggctttagcagaggaagcagctgagcaaaggcatctggagggtttacaagatcgataattccgtcaattccgttggtatagcgcagtaaaacttgggtgttaaccgaactcttatggcgatcgataacattgcaggcaccgagtttatgcaacaaagtcgttgcctctgtagcggcaacagcaatgactttgtaaccgacctgagcggcaaactgaactgtaaacgtgccaactccaccgctggcaccgaccagaagcacgcggctaccggagggaagattcaatgtgttaacggcctgccaggcggtcattgcggcaataggtaatgctgaagcttgaaccagatcgatcagattattaacccgcaataacatcgcatcttcctgaatgacctggtattcagcgaaactcccgtgaccaatttgatgatgtaaaaagttgccgataaccgcatcaccaaccaaaaattttgtcacgccttcgccaacggcttcaacaatacccgagccttccgcacctaaaatcagcggaaaatgatggggctttttgccatccaaaaaccctgtagcaatgcgccaatcgatgggattgagactagcggctaccattcgcagcagaatttcacctggggctggagtgggtttatctagcgtggctagtttgggtgtgtcagaaaatgaatcaatcataaccgcttccatagcgctctcctttcgactgcgacgaggttttttatggtaaatgagtatatttgctggctaatcgcggcagaagaggggtaaataggaaggactgtctcgatttttaggataatgcaatgcagaaactgatgaatctggatttgaacgatctgtattacttcacctgtgtcgctgaatttggcggttttagcgccgccagtcgcgctttggggatttccaaatccagactcagcgcacgtgtgttaacgctagaaaagaatcttggcgtattgttgtttcaacgcacaaccagacaggtgcagttaaccgaaattgggcaaaacattctggaaaactgcaaggccttggtcgcagaggctgaagtggtgcaaggcgttgtttccaattcgcgggccgaggtcgcggggctggtacgggtcagttgcccgccgctggctgcaagacttctgctagcgccttatctatccgattttctgcagcaataccccaaggttagggtgcaattggtcacttcagatcaacgtttcgatcccatcagcgataatctggatgtattaattcgcctgcgcgctgcatcgcaaatggacgaaggattggtctcacgcgtactgggtcacagccagcgtattctggtcgcctcacctgattatcttgctcaggccggtgctttgatggcaccagaagacctgattaaacaccagactctaagcctgattgattcagagtcggtacaacaatggccgctcattggcccggatgacaagttggagaatattcagattcagccccggctaatgtgcatggagtggagcgtcatgctgcaagccgtttgtcagggattgggcattgcttctgtgccggacatcgcctgccaaaaagagattgccagcggagctttggtgcgcgtgttaccgcaatgggcttcaaatccgctagtggtgcatgccgtttttcctacccgacgtggaatgctgttatcggtgcgcgtatttttggactttctgattgccactatgcctagggcgctctcagctgataagtaagttgtggggtagcttcgtgcgctctccgacgttactgatatagttaatgataagagttctgtctattacgttagccagccttaatgcaggtatacctatatgtcagcttcgtcaattaaaaagctatctctgtggtcgttaacgtctttggtagtaggatcaatgatcggggccggtattttttcgcttccggcgacgtttggccgagctaccggcggtttaggggcaatgattgcctgggtgattgccggtggcgggatgttaacgctggcctttgtgtttcaaacattggcgcagcgtaagcctgagctggattccggcgtgtatatttatgcgcaaaaaggttttggtgattacgctggatttgcttccgcgataggtttttgggctggagcctgtattggcagcgtgtcctattttgtactgataaaatcgacgctgggggcttttttccctttattaggtgacggtaatacgctttcggcggtgttgattgcttccttaatcctctggagttttcattttatggtgctgcgaggtgtgaaagaagccgccaccattaataccatcgcgacgttcgctaaagtcgttcctatctttatttttattgtggtactgattttcgcctttaacagcgatatttttatgcagaatttctggggcgcgccggtgccgtcgatgacggcagatatcaaccattgggataattacggttatgtcggccatgcggccacggaaatagacgcgtcttcaacctcattatttactcaaatacgtagcacgatgttagtcacggtatttgtttttgtggggatagagggcgccagtgtttattcgcgctatgccaaagaacgcaggcacgttggtattgccaccgtacttggttttatcggggtactgtgtttattagttttggtcacgatgctgtcatacggcgtgttactgcgccccgatttagccagtttaaggcagccatcaatggcgggcgtgctggagcatattgttggccgctggggcgctatttttattagtatcggtttaattatctcggtgatgggggcttatctttcgtggacgttgctggctgccgaagcgctgtattccgcggctaaaagtcatattgtgccaaaaatctttgccacggaaaacaagcatggtgtgccctctgcggcggtgtggatgtcgaatatttttattcaatttttcttaattgtcaccctattcacagaatatgcgttccagctagctttagagttaaccagttctctggtgctgattccttacctgttggttgcggcctatggcttaaaactggcatggcgcagggaaacctatgaaaaggatagtagagagcatagaaaagactttttgattgccgccatagctacgttgtacgccattttgatggtgtatgccggtggactgaaatacgtattactgtcggccgtcatctatggaccaggcactttgttgtttattttggccaagagagagcagcataaaccggtatttacagccgttgagaaggttttatttgccgtcgccattgccgcggcagcgggcgcggtttatggtttggtgaccggcgccatcaatatataaatacacggcactcaatccaggataccgcagtgtagagcccaatagttcttctcgctgctatattatctttagcaacaatcacttataacgacagcctctgggggcgttcagagcctgagtgtttcacgttcatagcgatgggaataccgcagaatgtttcagatctcaacggataaaaatgtgctggatatcgagcttattcatgattttctgtcccgccagagtctctgggcacaggggatttcgcgagaaaaagttgaacgttctctttgcggttcgctttgctttggcggttacctgagcggacggcaagtggcgtttgctagagtcatcaccgattgtgctaccttcgctaatctggtggatgtgtttgtattacctgaatttcgtggtcagggttatagtaaactgctgctcggtgaggtgttttctcatccggatttgcaggggctgcgccgttttactttggctacgtcagatacccatgggctttatgctcaattcggttttacggcactgagtcagccgcagactttcatgcaacgttactctcccaatatttatcgagagtagcttgtaaaaaatggcgtaaagtgcggaactcattcgcacttaatcggcgagtgatggagggttaatatattaccgttattaatgcgttccattatgcgctgaatttcgttccggcaggggcttgatctgtcacctagactacgacaggatctgtgaccattaagtggtcagcacccgcgggtaaatgaatgaggtcgttaccacttaaataaaaaatggctggtgaataatacaccggtaggtgctttcttgaaaaaacaacgaaactctgtccccgcgggtgattacacggggggaataggtgatgcgcagtttgcactggtcgtgttgctggcgacttctgcggcattagtggttgtaactttggctgtaattttatggatagtttgagcaattgttgagtaatggaggatgtgtggataagagtttatttgatgataataaagtcattgccttggtaggattattaacagcggcgttaattgccgtcagtgtgatgtttactctgacttatatgacggaacgccagcgtaatgaagctaaagttgtagatatccaaaactgttatatccaaaacaaataaccctgtttagatgccagagccacactgccgctttctgagggccggggctaatatcatctcagggaaaattacgcctgtttttgatggatggtgtgcagcggcggggcgattttcaaatcaatgtcggcattctgtcgaaaatcgtagggtgtaatgccgtaacgcttcctgaacatataggtaaagtgcgactgcgaaccaaaaccaaaatccaaagcaatatcaaaaatagaagtgtcactgcttctcaattgataaaccgcgcccgccaatcttctttcccggatgtatttacccagagaaatgccggtcacttccttgaatattttttgcatatgccacagcgaatagcctgagtaagccgccagctcctcaaggtggatgactctaccgaggtgagtttcaacccatttactgagggcgcagactaacgagagatggttttcttgttgcattatttagtctgttccgaagataagtagtgatgcagtatacacaagttaaatccaacaagacaaaatcagggcgccttcctgattagcatatatgattaaatggcacgattaagtaaaaaatgtatcagctgcgagagtaaaaggagtagtgtcgtttgtgggggattccccctgaggaatttgtccgttcccgtaagaaaaaatcaaaattgatgaggtgatcgcatgttgataacggtgattatgactctgatagcggtagttggtgttacggtgtttctcatgatgccagtgatgattttggataaaggcaaacgtgttggaggtgatgaactgtgagaataggattgctgtgatgattgtctacttcgaaccaggcgaactgctcatctagcgcctggtttttttatactttccttttggttcctcgtcagtttaagacgctcatttcgctacaatgctattgattttcagaaaccgcgcacaggggtaaacgctgcgtcaaatatcccatttccaagcaatctcaaaggttaaccgtggttaaacctatacagattattctgatgacgacaccccgaataaagaaaagttgttgcgagcgtgatattctttgcctactgagctgcaaattaggaattttattgtgtctgagattttaacaaacgatcaagaattggtatccgatctggttgcctgtcagttagtcatcaaacaaatccttgatgttattgacgttatcgcgcctaccgaagtgcgcgataagatgtctcatcaactcaaatccattgatttctctactcatcccgcaggtgccgatccggtgactaaacgggcaattgagaaagccatcgcccttattgatctgaaattcacccaaaactgaaaaaacaacccgcagtatatgcgggctgttagtcaagttactcaatcaccgaggtggtttttttcagtaatgggcagtcggtgatgccgataaagccattatcgccattcaggaattgtgcagtaacaatacttctggctgtgaggtacttacactgtaggcctaatccagcagcgttcttttcgctgccgataaggacaccatagcctgaaaaaagcagtgccaggtaagcgaccagcaaaatgagtgcaagtctgaaaagggtcataaagagctccataaattgagatgtactcaatctgttacaaggttgagcacaactctagctgaaagattaaggtcagtttacgctaaaaatcctaaacttgcggagtagggcaaggcgtttaacctgaggaataacatccgtagcccgggcaggcagagtgatatagagaatgaccgttcggctatgacccgttgaggctggctgaagtataatttatcaaaataattaaaaggtgcctgatgtgaacattaagaaacttgttgcaacggtgatactgatagccgtttgttgcttgttttatctattagcgttagacagttactgcgatcaaggcggtaatttctctaatggtatttgttctattaccgctattgtcccttggtaatgttgaaccgcgatctggcaaaacagaggcataattattgcccgttgccgtctttcctctgaacaagtgtgctacgtttcagtattagtttgttttctgaacgcgccattgggcgcggcgcagtgataagatagcgttctagtctcgcatgtaatagggttgtcaatgtacgaaacaggtatgggcgcagtgaatatcgcctcaattggattctcatcgctggtggtcgtgttctttttggtcgtctggttctttttaagccgagccagcgttcgcgccaatgagcaaattcgattgcttcaggaaatcactgaacagcaaaaacaacaaattgagttactcaatacgttagtgcgtaagacctccggcgacggcaaggatttaccggatggtgatacggtagaagtgctggattttaaaggattcattcctgagcgttaatgctgtgaaggcactgtgaccgggttgcagtgcctgcccgatgtgctggtttcactcctttttctattatcctcctcgcggtaaaaattgctgcttcagcgttattgttcctttcatttatacattattagctttaatcttaaaccgacgctgattgtcataaatgtgtcttatttttcccctaatgtagccggaatactccagcccaagggtaaacctagatgattaaatggtatgaagaaagcgacaccgaagtgaaccgaaatattgcactgctgacgggagaagatccggacaaatggtacccttacggcggtgtgaaaggtaaagactattgcaagaatccctccgatgcctggccgattatctgcgccaataaaataggcattcactctcctgaaaatagcgacgataaccactggcaggcgcgtatcgccacaagccagggggaatggcaagcccgaagcaccagcccattacgggcggcaatgatctgttttttattgagtcaggatactgagaaagccctaatgtagttatcgagtaaatccgccagaaaatctggctgggtagtatgcgttatccatattttagccagtcattttgcgatggagctgatcatgaaacgtattattaaaggggatatgaatttatcccacctcgttattgctcatacggcgattgatcgccaccaacagtcctatggcgatcgtcgtcaaggctggccttcaacttatctcatccgctataaaaataatcgggtcgccgttgaagttgtcactcgacgtcagtcttatgttgccacattaatgataggtgcacgtaatctgagtagattgtgcaatattccatcgctttatccttaattaattgcatcaatcacatctttgccgtggttgatactcaaacatcaatggcattgatataacgaattttgccaccgggtttatcacaaatttcagactgataaacccccattttccccgcaatgaaatgccttaatccttgatgctaccgggtttaaatgttaaaaagccgcgcggcttcatttacggacagtcaattttctcgtttaacgggaggaaattgcggcagaggatacaatgcaagagcagttacaagattcgaccctaaaacgagggttaaaaaaccgacatattcagctgattgcgctaggtggcgcgattggtaccggcctgtttctgggcatcgcgcaaacgattcaaatggctggaccttcggttattttaggctatgccatcggcgggattattgcctttttgattatgcgtcaactgggtgaaatggtcgttgaagagccggttgctggttcatttagccattttgcctataaatattggggcgattttgcgggcttcctgtcaggctggaattattgggcaatgttcattttggtgggcatggctgagctgacggcggtgggtatctatatccaatattggtggccggaaatccccacttgggtttctgccgcagtattttttgtcgtaatcaacgctataaatttaatcaacgtccgaatgtatggtgaaaccgagttctggtttgccattatcaaagttgccgccatcatcggaatgattgtatttggcgcttatctgctggcctcgggttccggtgggccaggggcgtccgtcaccaacctttgggcacatggcggctttatgccacatggtatcagcggcctgattatggcgatggcggtcattatgttttctttcggcgggttggaaatggtcggtattaccgccgctgaagccgaagacccgcgtcgtagcattcctaaggcgaccaatcaggtggtttaccggattttaatcttctacatcggttctctgtcggtattgctttccctgtatccctggataaaagtggttgagggtggtagcccgtttgtcatgattttccatgcgttagacagcaatttggttgccactattcttaacgtggtggtactgactgcggccctttcggtctataacagtggagtttattgtaatagccgcatgttatttgggctggcaacgcaaggcaatgcgcctaaaatattgaccaaggtgaataagcgcggcgtaccggtgttatcaatcgctttgtctgctttggctacctccgctggcgtattaattaactacatcatgcccggaaaagcatttgctttattgatggcgctggtggtctcaacgctggtgattaactgggtcatgatctgcctggcgcatttgaaattccgcgccgctaaagtgcgtgaaggcgtagagccaagttttaaggctttgtggtatccgtacggtaattatctgtgcctggtgttcctcagcctgattctggtgattatgtacatgaccgaagggatccgtatttccgtgcagttaatgcctatttggcttggggtgctgtggatcggttttatactgacacgacggaaaaaagccgaggcttaagatgaaaccggcagtttgggtttattttctcatgtctgccgtgcgaatgttttgaaacctgacgtaaagcccgctcatcagcgggcttttttgtgagcgaaatcgataaatagtcggtgctgaatgcgcctcaacgctttgtcacgcggataagaaatagagacgaagaaagacggagtggatagaggcaaaaggcgttagaggcggcggggggctattttccgccttaatttcgggttaatttaggcgaagtaaagaatatcttgccgagtgtgcgagctaataaatcagtgcaccgagtgagtgcactgctatttgagaatcattcctgataacggcgtagttatccattaagagatctggtgcaaattggtttgagatattacgccacagcagggaatattatctccatataatcaaatatgattagaactgccagcgaagccaggcaaacaatacgttaccattattataagtccccggaatgtaggtggcttgcagcgaaagcttattatattcgacggaaaccagcggcaaaggcaatggcatcggaatgtaatagtactcatggcgcgcagtgacgctgagagtaaagcccgcgccgaaacgccatccgtccattgctcctggaatccacatcttctgaaagccataaccaataataggctcaactttattgtgtgaatccataaaagccatggcatacagagagtgccagtcgttatcttcatcgtatcgatatttgccaaagccaaagccccacggattctcgttatacgagtctgtcttttccttgtcgtaggtccaacggttatgccatgtcagcaccggtaggtagaattcacgccccggcgcatcccaggtcagcgagacattgcctttaaaacgttcccacaggccgccatcttcggctttaatggcattaggttgattggctaccggtaacgcttcgctgcatgccggaaaggccacagacaacagactcggcgcaaggagagcagcacctatagctgcaactttatatttcataatggagtctctggtatcgataagttgaatagggggagtttctgccccttgtgcctatcaaaggtaaaacaaattttgccgattaattattattgaaaataatccgactattagccgttttgattactttcataggtgtctttatagctagtttaattaatttagtaaaatacatcgggctttaaataaaggcgggtattgtactgaaaaaaatgctgatgaaaaggaagaaatatcctatttacccttttcatttagctaaggtataagaatcactcggtttttcaggtgcgtttacttgattaaaagagtccgttttatgtgtatttatgccactagtgataatccattccattgcaccatgatagtgcgcatccattttgattaaatagaataataaacttccgttaatgatgaggtactaaatattgattaaatagattccgatattttatttattattcacatttatttttttaggtaaatatatttgtagtcatttatgcatcgtaacgtttttttgtgaagacctgcggcttttagccgttattgtcatcagattgtcataagcatgagatttcgccaacctgagcataagtaaggatttaatcaactaaaagttgaaaatttcaacccggagtgaggtgtggaagggctgagggctggcagagcaggtatattctatttttatatatcaaagaccaataggctttattaaaatagatttgttccgcgtagaacggatagaaaatcgacaacgtttatgacgtaataggtattataaaaatagttagcaagattgttaaagttaagcaaaaaaaacgggttaaacagtataaaaaaatagagcagaaaatacgatgaccttcaacaaatttcagcatatttaagcagtgtttgtgatcgactggcccaaatatgtgcgacaagtacatcgttgattaaaaatggcttgccaacgaattcagagtatgtgataacgcatatgggtaaaacgaggtacagttctgtatatgtgtggcattttcagtaaagaagttctgagtaaagacgttagcgttgaataccgcttctctgccgatccttatcttagtgcctcaagcagtaacgactctagtttgtctatgtaacgcctccgggcgagttaaacaatccaaaggaaatactcaagatggctaagattaaaggtcaagttaagtggttcaacgagtctaaaggtttcggtttcatcactccagctgacggcagcaaagatgtgttcgtacacttctctgcaatccagggtaacggcttcaaaaccttgggcgaaggccagaacgtagagttcgaaatccaagacggtcagaaaggtccgtctgcagtaaacgttactgcaatctaattcagctctagctgaaaaaaacccgccttggtgcgggttttttcgtttctatagtaatccgttttattaataattaaggcaagatgattaagccggaatattggtttctgccgctgatccctggatgggttggatctatggctcgctgctggctattgcggcggaaactggtgtatttaaacgcagggacaagctcttcccgattctcgttggccgaaccggctgatttcggcggcatgcagtctgccggtgtacagatggtgcaacttcccgcgcggtctatctgatgaaaacccaatgattgcaactgatgctcagcaatggcggtaaggttgagatgtcgatagcggggagaaataaccgtttttgggatattcatattatcaataaatcgtgccactaaatcttcggttacctcgtaacaacaggaacgtgccgctgggccaatagctgcaacccattcatgcggcgaatcatcttgcgatatacgttctgccattcgcagtaaaattccatccaataatccgcgccagcctgcgtgagccacggcgatagcttttccgtcccgtcggctaaaaatgaccggtaggcagtccgccgtgagtaccgttagcaaaataccgggttgggtggtgtataaaccgtcggtttcaccgcaggcttgcttgggttcgcgaacatcgacaattcgcgtaccatgtacctgttttttctccggcatggtggcacgaaatggctgtaaattctccggcagcaatgcggatttactgccaaagccatgaagaatatgagggacatgggtaaataatctggatacgtcagtcatgtgaatcactttgcctcggtggctgcggagtagcccagtgtaggccgaattttgattagttggctactgttggctgctttaataacctgaatgacgttcccatttgcgctttgttgcaaaataagacgccttgtatcactgtttccaccctgtaacggccaaggttcaggtttaatgatcgaccagagcggataatgcctacagggaaaccgaatgatttctaaagtaaataatgacgctaacaattttgtccgttggcgttttagtctgctgtgcggttgtatcctgctgtcactcctaggattgcttgggcgggtggcctggctacaggtggttgaaccggagccgctggtaaaagaagagaatatgcgttcggttcgcgtgatgacgaccccgaatactcgcggcatgattaccgatcgcaacggtcatcctctggcggtgagcgtgccggtggcggcaatttgggccgaccccaaggttttgctggaaaaaggcggcgtcgggaatgatgcccgctggcgggcgttgtcccaaatgctacatatgccattggctgatattgccagccgtatcaatcagaatccggatgggcgttttgtgtatttagcgcgacaggtggagcaggcgtcggctgagtatattcaacggcttaaactgccgggaatcgccctgagagcggagtcgcgccggttctatccctcgggtgctacggtggcgaatctggtcggcttcactaatatcgatgaccaaggcatcgaaggtatcgaaaagagttttaatcagctactgagcggaacggcgggcaatcgggtagtacgcaaagaccgctacggcaacgtggtggaggatatttccgccaccgatagtcatcccggtcaaaatgttcagctcagtattgatgagcgcttacaggccgaagcttcccatgctttaaccaatgcggtgttgtttaataaggcggagtctggatcggcggtgttggtggatgtggacactggcgaagtgctggcgatggccaattacccgacctataaccccaataaccgaaccgatacgccggagggaaatttccgcaatcgggctatcagcgatatttttgaaccgggttcgacggtaaaacctatggtggtgatgacggcattacagcgcaaactagtgaaacccgatagcgtgttagatacgcacccttatattttgagtggtcaccaaattcgtgacgtcggcttttaccccgcgctgtctctcactggcgtgttacaaaaatccagcgacgtcggcgtatcccgcctggcattagcgatgcccgcttcggcactgctaaaaacctatggctcatttgggttgggcaaatctaccgaattgggattaaccggagaaagcagtgggttgatgccgcaccgtcaacgctggagcgatctggatcgcgccactttctcgtttggctacggattgatggtgacgccactgcagttggcgcgggtttacgccacgattggcagttatgggatttatcgccctttgtctatcactaaagtcgatccgccggtgttagggcagcgagtcctgcctgcggaacaggttcaagaagtagagcatatgatggaaagcgtggcgctgcccggcggcggcggggtgaaagcagcggtacgcggttatcgggtggcagttaaaaccggtaccgctaagaaaattggccccaacggacaatatattgataaatatgtggcttataccgctggcgtggctcccgccagccagccgcgttttgctctggtggtggtgattaataacccgcaagggggaaaatattacggtggagcagtggcggccccggtattcagcgaaattatggggcaaattttgcgaaccaagaatgtggagccagatgccgttcttggctcgcctcagcgccatagctgagaatagtgtcggacaaggctgccccggcttgcaaccacggaggcggttctttagactagcgccgccttgcgcgttctcgcattttccctgctatctggaaatataaccatgtcttatcaatgtcctctttgccatcagccgttacagcttaatcagaagcagtggcgctgcgaaaataatcaccagttcgattgtgccaaagagggctatgtcaatttgctgcccgttcagcataaaggctccaggcagccgggagacagcccggagatgatgcaggcgcggcgcgcatttcttgatgccggttactatcagccactgcaacggcgggttgctgcgctgttggacggcgttttgccgcctgaagccggattattgctagatattggctgtggtgaggggtattacaccgcggctatagctcaacagctgaaacagcggcgagagatgcaggtttatggcttagacgtcgccaaggttgcggtgcgttatggggcaaaacgctaccctgaggtgagtttttgcgtggcatccagccaccgtttgccgtttgccaacggggcactggacggcgttgtgcgtatttatgcgccatgtaaggcggaagaattggcgcgagcggtgaaaccgggcgggtttctggtgacggttgcgccgggcccacgtcatttatatcaattgaaagaaatgatctatcagcaagtgcagctgcatggtgagaacgacgaacatttggaaggatttgatttggttagccatgagtcattagcctacccaatggcgttgccgggatcgcaggctgtcaatttattgcaaatgacgccttttgcctggcgagcgtcagttgaaaccggtcagcagttggccgagatggaaacttttgcctgcgaaacagattttgttattcgtgtgcatcagcggcatatcgataaaactgaatgtagtgcagattaatgtcggtttctattttatatagccagatcattatggcttaaataatatttagataaagaattatgagcgtcagggaaaataggcgaacctgacgctctataacattcaatgatgtaataaacagcgaaatagcgataattaagtcaaatcattagtgataactaggggtgaccgttttatagtattggtaatgatttagatattatcaataaaccaatcagatcgcgggccggggaaagtgtcggcctaatgatgggtcaatgagcaactggattggttctttcactgtcattttattaactctttaaatttaaaacgtattatctctatttttgtgagttaagatccaggttacgccatgtgcgtccgccagactcggtcaccagaatcgatggtacgaagcgcacttgctctgccactttcaaggctaagtcggcaacttcctgcttattcaacgatccgctgccgtaattatattcgccgtccggtaatttataaactttgtcccgacctattaatcgggtaaaaccggcttcgtccattttttcattaagcgtctggtaatcgctttcttcggcattatgcaatttaacactcacggtaaagtaaggcatagaaatccatttatttagtgcgggataatatgctgtatatcatgatgggcggctttttattatgaccgagatcgaattgctgagaattaagcaggatgcgttaaggtaggtggcggttatttgtacgaatcattacggcaagcaggataataatgaagagaaaagaagagaaaagaagggaagaaaagagaaaggaagaaaagagaaaggaagggaagagaggaacagtgccagtgctctgagaagttaaagaccaatcacccatcggttacgaccaccgtgtttagccgagtagcaggcaatatctgcctgacgcaacgcctgaaccgtggattcggtttgttgggttagattgatattatcgtaagtaaaaaacaggaaatttggcttaagggatgttttttaagataaaacgcattctaactgcgtttgtgggctataaactcgaatcgttaatagcgccatatgcagaggcgattaatcttagtgatgtgattgcgttgagtggttacatttatattgtggtgaacggtgcgcgaaacgaatcagcgtctgttcaatttcttatctaaattattgacgcgctgtaatgggcaggtagagcaaatttccaatccattcaaacgatagcgtaaacagcaaagtcggcgctcaattcttatattgccacttttctccgtgacctgacgaacaggctgaaacagcttgtttttgctgccgtcggacagggtacgtaaagcgagaaaatgctcggcaatttgcgtatttgcctgctgttcctgcgccatttttattccctgatacagacgaatccccgcgttattccaaaacaggctttcgcccatacccgccagttggctcagagtaccgcaaaccggtgtcagatgatcttgcaccaactgctgaaaacgacgttcagggtcttgttgggttacttgatgacccgaatgggaaagaataaagctttcaaccacgccggcttcattgagcgtcaggccgatatgctccggtaaaatgggcaactgccagttgaactgcaaattaatccgcatccacggccccaacaggcgggcaaagtaccattgcgaccattttgataccaaagctgcgcgatcttcattcgaatgaagattcagcaggggcgagatcaaggtgagtgcgcgttcaggcgtatataaagcaccggcagaaaaagtctcgcgttgtctcgaggctgcagacggaaagtactgttcaatggcttcctgtcgggcgaggctgagattttctgcggttagcgccataataatcctatttaaaaaccttattcaaatcaggctttggggcatcggctgacgagttcaggcaagcataataggggataagaatcataatgagaatcgtttttatatccagagtgagatttcccgcttccggtggttgcaaggggtcgcattgctgtcgtttggcacattttcctatggttcaacgccacgacatctgaatctcaaccacattattgcattgcgtgggaatgccttcgttcgaacgattttggcgctggacgcaatagcgtgagcggtggcagacaagctggattacgggcaattttttcgggtgctccgcgctttatctatctgttacgtaaacaaatctcgtaaaagcattcaaattaatgaacataaacgcttgcaaagtgtcacgtcggcggcataattcgtgaattcttataataagcattcgcatttagttattaacatttaggcatcaacctttaaatattcgcattagcgataacatcgcaaactttcagggaacaccaaataatgaaaagcacagcaataatccggggcggtaaaaatcgtttagcgccgcgccttttgtttgtcatgatcggcgcagccttgggcacgctatctgcgccgctaatggcagccgatgaaacagcggtagcaaccaaagacgccgctaagccagctgcggcaaaaggtggcgatactattaccgtcgttggcacgcaggaaactttccgcgcgggcggtaacgatctgattccgacctatctggacggtcaggtggcgaacggtggccgcattggtttcctcggccagcaggatgctcgtaacgttccatttaacgttatcggttacacctctaagctggtggaagatcaacaggcacatacaatagctgaggtcgtgaaaaatgatgcctcggtacaaaatgtacgcggtttcggtaatgcctcacaaaactatcggattcgtggttttaatctggatggtgatgatatttcattcggcggcctgttcggcgtattgccgcgtcaggttgttgacaccagcatgatcgaacgcgttgaagtattcaaaggcccaaacgtttttgtgaacggtatttcgccgagcggtagcggcgttggcgggatgattaaccttgaacctaaacgcgccggtgatacgccattgactcgcgttagtctggattatacttcctcatccaaagtgggcggggcgctggatgtggggcgtcgctttggtgacaatgatcagtttggcgtgcgtgtgaatatgctgcatcgcgaaggggagacggcaatccatgaccagaaagagcgtaccaccgcactttctaccggcttggattatcgtggcgatcgcgcccgtacttccatcgatgtgggttatcagaaacaaaccgtacacggcatgcgtaccgatgttgcggtaggcgccgcgaccgttattcctgaaccgccggcggcgactttgaattatggtcagcagtgggtttataccgacatggcgaccacctttggtatgctgcgcagtgaatatgacctaagtcataactggaccgtctatggttctgttggtgccagtcgtaacgaagaaaccggccagtatggctcacctacactgacggataacaacggcaacgcgactattagccgcctgtacgtgccttatacctcggattctattgccgcgttaggcggggttcgcggtcatttcgatactggtttggtcacgcataaagtgaatattggttatgcggccaactatcgtaaagcgatgtccgcctggaatatgtccgacccggtagagaccaatatctataatccgggcgtgattccattcccgccggcaacttcaggtagtgccaatcaggatccaacgcttaacagtcaggttcgcgccagcagcatttccgtgtctgataccttatcggcactggatgataaagtgcagctgatgctggggctgcgtcgccaggaattggtgattcgtaactttagtaacggtgtgccggacagcgtcaattcacaagatgcgatgaaagtgaccccaatctacggcgtgttggttaagccgtgggaaaacgtatctctgtatgcaaaccacattgaagcgttgtctccggggaaagttgcgccctggtatacggcaaacgcaggtaatgtaaccggcattgttcactctaaacaaaatgaagtgggcgtgaaatttgataacaaacgctatggaggtacgttagcgctgtttgaaattaccaagccggcaggttctatcgatcctgtcaccaatacatacgctctcggcggcgaacaacgtaaccgtggtattgagctgaatgtgttcggtgaacccgtatttggcactcgcctgttaggtagcgcggtctggttagatcctattctgactcaagcgcaggatagtaagaataacggtaactacgcggttggcgttgctcgctatcaattggtgttcggcggcgaatatgatattcagtcggttgaggggttaacggcgacaggcaccgtgactcgttccggctctcagtatgcgaatgatgccaataccttgaaaatcaaaccgtggactcgtctggatctgggtatgcgttataccatgccgttaaaagataccaatctaatctggcgtgccaacctaatgaacgtgactaacgaacgttattgggaatctgtagaagatacgggtacttatatttatcaaggcaatccgcgcgagctgaaactgtctgtctcgatggatttctaattagcttaggctaattaaactctctgtcactgtcccgccgttgggttgctaacagcgggatttttttaatcgataatagctcgtttaccgatattctgcgccaaacgcagcagataaccgtccgcatcttgcactaaacattgtcgctgggcgatttcgatttcattggcacgataccaaacgtcggcacagggctgaaacaccgggcagttgacctgctgcaggcgcgtcagaatcggggcgacctcagtcacttcaatctggaaagtcacgccattacccaatgtcttaccgaaaggtgccgtcagccaatgatcatcatctccctgatactgctccagcataatttgcgcaccttcgcgaaccagatagataaagccttgttctggtcggtcgtatctgatgctgaaaccaattatttcacaccaaaaataaatgcttttcttgatgtcgcgcaccactatttcgggagccaacgtcgcccaattttccattttctgttgttacctcagtgaatagcgggaacagacagaataggggagagagggccattcgccaatacaaggaggggaaagttgtgttgtgagtaggatgaatcgtgaggaagagagtgttcaggcagccgatcagggaataactaaccggctgcggaggagctaggccatgttatacaggtgctcgtatagaatattaaagccgatgccgataagaataacgccaccgataatttcggctctcttgcctaacagtgggccaatatagcggccaatcagcataccgagcgttgccattatcatggtggccataccgatagccatggcggtatgcaggatattgacctgtaagaatgccagacctacaccgatggccattgcgtccaggctggtggcaatggcggtcatcaccaaaacccaaaagccgtgacgcctaacctgcgcttcgtccgcagaaggccctttacagccttcgacaatcattcggcaacctaagataaacagcaggctaaaggctacccagtgatcccactccataatgtattggctggcaaataagccgatgctccagccgattaatggcgtaatagcttcaatcacgccgaaaattaatccggtgcgaacggcttcacgaaaacggggtttatacagagtggcacctttgccaattgaggccgcgaatgcgtccattgacatgccaaaagccagaataagggttgctgatagattcatggtaaatagtctcggccgggtggctccatatacacgcaacccacccccaacctacgacggagttacgtgtctatggtctcgccaaccttacctggctgcccgcaccacgtttcgatgaatgaaacgagtatgttgatacgggcgtttctgaaaagcgatgtaatgcaggattacatgcgtcagaaaccggctactccccaatgaacggcgcaaccttatcatattattttgacatcggacaactataaaaaaataatagcgatcgagttgataatgatatttattcttgttatcaacttcagcgctaaatcagatgatataagcagcaataataatgtggacttaaagcggaaatatatttttgttgttggcaaattaagcattctgcggaaattttaatctgccattaggttcgaggaaatattttcaaccttgattttcaaggaaaaagttataaattttttctaggtcatccaaatgtgtcacttgaatcagtaacctacgcttttctaactcgataactagaatgccatcttcagataaattcatagtctttatccggttatattctataaaagcgttagcgtagaagaatccggtgggtttaaacaataatttaggccaacggatataagatatatacagagcgactaaagccaaaccaaacaataaataagtggtgagtggggcgccgtcggacatcacattattataaataagaatggcaattaacccgacaaagatcaggcagtcgagtttatttttacgttttaggcggatggccaataacgtttttcccttcaacgtcttcatgatgaattcgtcgtaaatagcgtagataagcaatagggtaataaagacaaccaagacaatatcggtaaccgacatgcgtttactcctgaaaaaacaaccgggggctagcccccggtttgatacagatatacagacagtgcgcggaaattacggtgccaggaaaccaatccagtagccgaagataccgatggcgaagaagcccataataatccacagggcgttaactttacggcgtaacagccacatacagccgaaggttaacagtagcggtaccagccccggcatcaactgatccagaatggtttgtaccgtcgtgatagtggtttcaccggcctggttggtaatacgggataccaccaccggaatatcaacgtgcgtccacttgttaaccaaggcccccataacaaacaggccgagaattgacgccccctcggtcagtttttgcaggaagccgccgcccatatcgttaacgatattgacccctttcttataaccgtaggccacgccgtaataacgggttagcaggcgaaccaggttaaacagcacgaagaacaggatcggcccgagcaaactgccgctcaaggcgataccggcccccagcgccgcgaataccggacgtacggtgccccagaagatcgggtcacccacaccggccagaggccccattaaaccgactttgataccgttaatcgctgcatcgtcaatcggtgcgccgttagcccgttgttcttccattgccatggtaacgcccagtaccggcgcggccacgtaagggtgggtgttgaagaactccaaatggcgtttaattgcctgcttgcgctcatcgttattctctggatacagacgacggatcaccggcaccatagagaagcagaagcccagcgcctgcatacgttcgaagttccatgacccttggaaaaggttagagcgtaaaaacacaccgcgaatgtcgctggccgtgagtttcttttcaccagtagttgttgtatcaaccatttctctcaccttcgcttagtctaattcgttatcgagatcgttattggcaggagccggaccagactgcacaacctgagatttgttgtatttcgggctgagctgaatgtagagaacggccatgacgacaccaatcacacccaaagcaacaaggttgaagttggtgaaggctgcggtaacgaaacctaaatagaagaacggcatcaagtagccagcacgcatcatgttgataaccatggcgtaaccgaccacgacgatcataccccctgcgatattcagaccgttggtaacgacttctgggatagagttaagcagtgactgaacttccgatgtcccgacggaaagggcaacgatcagtgcaggaatagcaatacgcatggcctgtaagaacagggcagagacgtgtagccaggtaatggctcgcagactaccgcgctccgccgcactgtctgccgcgtgctggaaagccacggtaacggtacgaacgatgatggtcagcacttgaccggcggcggccagcgggatcgccagtgcaataccggccccgatgctttgaccaccggcgataaccagaatggtagaaatgatggatgccagagcagcatcaggggcaacggcggcgccgatgttcatccagcccagagcgatcatttccaacgtaccaccgatgataataccggttttcatatcacctaaaacgataccgattaaggtacaggcgacgaggggacggtgaaattggaactcatccagaatggaacccatcccggcgatacaggcaacgataaatatcagcacaatctgaagagttgtgatctccattgtacttctcctatgactaaaaaaagctgagtaaaataaccctgttcaaacagaaccggacataacctttctgtgtagttatttatagagctaattagttaagttttgcgatcagatccatcatttttaagcgactatccgaagacacttttcgtacttccagttcgatcccgcgttcatttaatttcttaaatgcttcgacatctttctcatcaacggaaaccgcgttgttgacctgggttttaccctgacggaacgccataccaccaatgttgactgatttaatatccacgccgccttctaccaggcgcaggacgtcgtttggattggtgaataacagcatgacccgatctttggcatatttagggttgttgtatacgcgaatggctttttccacatcgacgacgtgggccgttacgccgggaggagcaacctgagtcagtagggtcttacgcatatggtcggcagcaacttcatcactgacaacaataatacgattgacgttggtttctttggtccagcgagtagcgacctggccgtgaatcagacggtcatcgatacgcgccaaaccgatcttcatatggtcatcgggacccaaaggtgcagcgggcgcggacggcgctttggctgcgggagctggttgctgcgtctcgggcttatcactcgtatctggcgtttttaaggcttttacaccagtgcgaccggtttccaccgcgatactgaccagttcggcgaaggatggattatcatcacgcgccataaaggtttctaccagcatcggaatgttaaccccggtgacgacctcatagttttctttatcaacaacgatacggctggcggcattaaagggactgcctccccaggtatcgaccaggaacaagacacctttcgtggtatccagacctgccaatttccctgtgtacttctcaataagcgtttcggcattttcaccgggtacgaaatcgatatacgcgacgttttcttgctcgcctaggatcatttccgcagtacgcagtagctgttcagccgctgccccgtgtgtgccgatgataatagctatactcactcgctaccccctcagttaactcaagattgagttctggcacgtcatgaaagttggtttactaccagcgcgtccctgcggtacatattgaatctattatgatagtcgtaatcactacgacccgccgacgatttgtcctttatccccatgaatcgattcaggtcatgggcacaatgccgctggctggtatttattttagtcagtgaaaaaataatttatgtgacgttgctcatttattgggacatgttatgaatagatttagtctggttggataattaaacagcactgatgtgacaaagagtgttggaaggttaataattcccgctatgacattaaaaagattcctgataaagttaagttcatttttatttgtaaggagttaagggcctcagctctccctatggactgtcaccgaagttactgctttgaagaaggttatcccccgcctgcgggtaaaaatcaggttattcgatcgcgtatttatctatcgctcatcttcgtacaatctttcactgaattccgacgtgtaatcggtttgcggcgttttgtcgtgcctgttaaatcacgtctgtcccgtcagtcatgttctaatttttggagtcttgcatggaatttctaatggacccctcgatttgggcagggttacttacgctggtcgtgttggaaattgtactgggtatcgataacttggtgtttatcgccattctggccgacaaactgccgcctaaacagcgagacaaggcccgaattatcggcctggcgctggcgctgattatgcgtttgggactgctgtcggtgatttcatggatggttaccctcaccaccccgttgtttagcgtcgccagtttcagtttctccggacgggatttaatcctgttggtcggcgggctgttcctgttgtttaaagccaccactgagctacacgaacggctggaaggtaatcagcatgatggcaatgctaaccgaggctacgccagtttttgggcggtagtcgcgcaaattgtggtgctggatgcggtgttctcgctcgatgcggtgattaccgccgtcggcatggtgaacgatttaccggtcatgatgaccgcagtgatcattgcgatgggcgtcatgttgctggcctctaaagcgttaactaacttcgttaacgcccatcctacggtggtggtgctgtgccttagcttcctgttaatgatcggcttaagtctgatcgcggaaggtttcggtttccatattccgaaaggttatctgtacgcggccattggtttctctatcctgattgagctgtttaaccagattgcgcgccgtaactttatcaaaaatgaatcccggttgccgcgacgccagcgtaccgccgaggcgattattcgcttgatgggcggacgtaatcaggagcaagagcagggcaatgcgcctcaaaatgcgcccgttgaagcttttgcggaagaagagcgctatatgattagcggtgtgctgacgctggcttcccgctcattgcgcagcattatgacgccgcgcaccgaaatcagctgggttgattgccatcgctccaaagatgagattcggatgcagttgttggatacgccgcatagcttgttcccggtgtgccgtgactcgctggatcagattatcggcgtggtgcgagctaaagatctgctggtggccattgagcaaggccagtctatctgcgaatttgcggcggcaacgccacccatcgtggtgccagataccatggatgtcatcaatctgttggcggtgttgcgtaaagccaaagggcgtctggtggtagtcaatgatgaattcggtgtggttcaggggctggtaacgccgctggacgtgctggaagctatcgccggtgaattccctgacgaagatgaaaccccggatatcatcaccgacggggatggctggctggtgaagggcggtgcagatttgcactcgctggagcaagcgctgaactgtcaggaactggttagcccgacggaggactacgcatcgctggcggggatgttactttctcactccggccacatgccatctgccggagatgtgattgaactgcatcaactgcgtttccaaatcattgacgtgaccgattaccgtattgaattagttcgtatcgataaaatcgaaccttcagacgacgaataagcgcagattttcggttaaccagttataccctaagggagccaatcggctcccttttaacaatccagcctcctcctgctatctcggcttctgagggggcaatgcactgacgtcagccgtatttcttagcgcgcgaataatgcgctgaccattgaaacgctaaattagacggcgaaataacgctgcgataaaccggatgctgtttaaacggacgagactttcatggagagaaatatacgagtttacgtgagttgatagaccaagaaatgtgtctgatctccggcggtaatatgggcagcgggaatttacaggccgcagcgagtgtgaataccaatcattcagtgaattaatttctgctggagtggaccctctatcgatatgaatgaaacaataaatatcctccggcatagccggaggtttttcatatgcgcctataaggctctgttgccagccgcgccctaacaggcgcatcgcgatctgacatttgcatttatggattacttacggcccgtaaacgggctgcccggataggggatcgagagttgctctcccattttatcctcttccaactggtgctttatgtattcttgtatcctggctgtatttttcccaaccgtatcaacgtaataccctcgacaccagcactccctgttacggtatttgaacttcaaatcgccaaactgcttataaagcatcaggctgctctttcctttcaggtatcccataaaacccgacacactcattttgggcgggattaccagaagcatatggatgtgatccacacagcattctgcttccagaatattcacgtttttccattcgcacagcttttttaagatactgcctatcgctttgcgcttttccccgtagaacacctttcttcggtacttcggcgcaaaaaccatgtgatatttacagctccatcgcgtgtgcgctaagctcttttcgtccctcatagggacccccttttgatttcttgttgaacatttgcagttgccagaccgcaaactgttttaacaaatcaaaaggggtttttataactggctcaaagctgaaagctttaccgaacctccagcctagctggaggttttctgtgcacaataaaacgggagccgattgggctcccgtttgctgatttatttttgccggtttagcaaaaggcatcagtgagttgcattgtatatttagttacactgcactttgatcgccagaccgccgcgagaagtttcacggtatttagcattcatatctttaccggtttcaaacatggtttcgataaccttgtcgagagaaacgcgcggttcgctgctacggcgcattgccatgcgtgcggagttaatcgcttttaccgaagcaatcgcgtttcgttcgatgcaaggaacctgtacctgaccggcaaccgggtcacaggtcagacccaggttgtgctccataccgatttcggccgcaatgcatacttgaatcgggctagcgcccagcagctccgctaaaccggccgccgccatagaacaggctacgcccacttcaccctgacagcccacttctgcaccggaaatcgacgcattcattttatacagaatgccgatagcgccggaggcgaggaagtaacggataaagatttccggtgtcacaggctcgataaagtgatcgtagtaagccagaaccgctggaacgataccgcaggcgccgttggttggtgcagtcaccacgcgtccaccggcggcgttttcttcgttcacggccagcgcaaacatattcacccagtcaatcacgttcattggatcgctggaaagtttatcggaagaaaccaacagacggcgtagcgcagaagcgcgacgcggaacgcgtagcggacccgggagaaccccttcggtattcagaccacgatcgatacaggcgcgcatagtgtcccaaatcgccgtaaagtaagcatcaatctcttctttactgtgcatggccagctcgttctgcatcaccataccggagatggacatcccggtggtgcgacagtgggccagaatgtcttcagcggagttaaacggataaggtacgctaatctcgttgactgaggctttaccgaaatgttcttcatcgacgatgaagccgccgccgatagaatagtaagttttgctgtacactttttcatcgccagcgaaggcgtgaatttgcataccgttttcatgcaggggcaggttatcgctacggaaaaccatgccgccttcacgcgggaaatcaacttcgtgcaagccattggccagcatcagtttttcacgttgctcaacatcgcgaataaaaccgggaatgctatcgatatctacggtgtcaggcatattgcccgctaaccccataatgatagcgatatcagtatggtggcctttaccggttaatgacagtgagccgtaaacctccacggccacacgcgtgatagaaggcattagtccctgtgttaccaggtcgtctacaaactgtttgccggctttcatcggtccaaccgtatgagagctggacgggccgatgccgatcttaaacatgtcgaaaacgctaatcacgctagaactcctcaaaaggcattgtgtttaaagccgatgttttatggtcgaagcgtttaaaaattacgcaacgggaacatcggtattgtaggttgactcgtcaattttcgtgactttattcgcatgaaataaagtaatcgcgagccttagtttattttgtttttactggtgttagcggtatcgatcggatacagcaacggtcactctgttaaccaacaacataagtgactttttttacgggttattaaccccacactattagtggtttatagtgaaggaagctattttacaggtatttcataacgctgacaggcctgtttacagtttttttaaaaactgcgatacagagaacatagagtaaaagtggtaaaagtgaggtgatagggatcgttttatgctgaaaatgagggggttagcgcgtgatgatgtgatggttatcacgcgtttcagcgcggttcgatgctgacctgctgagccagacggcgaataatggcggcggtgagtccccagacaaattgactttcgtaccaggaaaggtaaatccggtggtgcgcgcccgcgcgatgaacatccagtggataataacgtgaaaggcttaacgcttcgtatagcggcatttcgaatagaccggcaacctcctcttcattaccgtgaaaggggacgtccgcaggaataagacccacaattggcgtgacctgaaaacccgtcgagctatccagtggccctagctgacccagcacgcgtaccgattcaggaggaatcgctacttcttcctgcgcttcccgcagagcggtttcaatcagcgaatgatcttctggatcggccttgccgccagggaaagccacttgtccggcgtgtttacgtaaatgagcggagcgacgagttaacagcagcgtcggctctgggcgacaaataatcggcaccagcaccgccgcgcgatgatgatgagccgacaggctgccgggctggggcaactgaagctgaaaacgactgataaattcggctaaactgatcccactcacggctgcgggttctcccccaataatggcaaaatgcgcgcgattttatcaaaagtttcttgatattcggcttgctcctgactgtctgccactatgccacctcccgcccaacaatagattttacccttttccgtcaataaggtacggatggtgatattggtatccatggtgccacagcaactaatatagccaatgtttccgcaatatccattacgacgatgaggctccagttgttcaataatctgcatggcacggattttgggcgcgccggtaatcgaaccgccggggaaacaggcacgcagcaattgtgttggcgaacaattcgtcggcagggtggcggtgatggtactcaccagatgatgcaccgcagggaaaggttccaccacgaacagctccggtacccgaacgctgccaggttcagcgacgcggccaatatcgttacgcagtaaatccacaatcatcaggttttctgctcgatctttgggtgacgcggctaagcgctcagcctgctgccgatcggcatccgcatctttcagtcgtggcaaagtgcctttgattggccgagtctgtatctgttgattttctagccagacaaaacgctcgggggaaacgctgatcaccgtatgttcaggcaggcgaataaatgcggagaaaggcgcgcgattgctggcgctcaggcgtaaaaaagcctgccattcatccccctgatattcggcgctgaagcgttgcgccagattgatttgatagcagtcgccactgtgcagatattcctgtacctgacgaaatttttcgccgtactcttcacgagccatattggcctgccaagggctttgcagctcgaaagactggggcgtagccgggcgctgctgctcgagccattgatggcgttgctctatatccccgtggctaattagcgtcagtttttgccgttggtgatcggcaatcagcgcccagtcatacaaaccaatggccatatccggcaagtgaatatcttgctgtgccagctccggtaagacctcgattctgcgtcctaaatcgtaaccaaatagccctaatgcgccacccaaaaagggtaggtctggattcggtgagcaggtcaatcccaagcaatccagctgttgctgtaataaatcgaagggatcgatttctgaatattgggtattcagggaatcgctgatttccgtttctttgcctcgggtgatcaaacgcacgcggggttcagcgaccaaaatatcaaacctgttatgggaatgctcggcaaaacccgaatgcagcagcatcgcccaaggcaaagtggaaatcggagcgaaatagcgtaacaacgcatcggggtgataaggcaggcttttacagaaaggagcattggcttgcaggctatgagtatttttttcgactgacgacatgacaactcgtgaaataatttcggggaaaagattcggcctgtaaggttatcacagattatgtgggcgagggcagtagcggcttgacagggaattccctattacgctaaagaaacgggtatacttgccggctaattcgtaggagacagataatgctagcgggaatgccctcactttctcaccaagagcaacaggaagctgttgaacgtattcaccaactgatgtccgaagggatgagcagtggtgaagccataggtctggttgcggaagaaattcgcgagcgccacaaaaacgatcctcaggcaatggtcatctttgatgatgaagactttgaggaacacagcgatcctgaatatcgccgcgacaatgaaaaagacgcggacgagtatgaggatgactacgaaggttagtgataactatcagtgaccagaagctaagttatccgaaggctagctagccaaagtcaatcgccatcatgaaggtttcggtaaactagcctgcaaccttcatgatgtttcgtatcacttcctagagccttggatttttagctgtggctgaccgtgatttgcccagcggcatttttcgccacggccacggcttgttctaccgtttcggctacggccagcgcgacgcccatccgccgtctgccggcaatttcgggtttaccaaacaaacgcacgtccacgtcacccagcagcgcatttcccaaaccgcgatataccacattctggctggttaactcaggtaaaataaccgccgaggcggcggggccatactggcgaatctggctgattggcatgccgaggaaggcgcgaacatgcagcgcaaattcggaaagattttgtgaaatcagcgtgaccataccggtatcgtgtgggcgaggggagacttcgctgaaaataacttcatcaccgcagataaacagctccacgccgaataaaccgtagccacccaaagtttgaaccactttagccgcgatcgcctgagcgcgttgcaacgccagttcgctcatctgctgcggctgccaggattcgcgataatcaccctcctcctgacggtggccaatcggcgcgcagaaatggataccatctacggcgctgatggtcagtagggtaatctcgaagtcaaaattaaccagaccttccacaatcacccgaccgccgccggcgcgaccgccttgctgtgcataattccatgcggtttgtcgttgctcttcactgcggatcaggctttgccctttgccagaggaactcatcactggtttcacaatgcacggataaccgatttcggccacggcttgacggaagcggctttcggtatcggcaaaacggtagctggaagtgggtaatcccagcgtttctgcggccagacgacgaatgccttcacggttcattgtcaggcgagtggcttcggcgcagggcactacgtgttgacccataagctccagctccaccagcatatcggtggcaatggcttcaatttccggcacgatgtagtgggggttttccagctccacaattcgtttgagcgccgccccatccagcatattaatcacgtgactgcggtgggcgacgtgcatagcaggggcatcggcatagcgatcgacggcgatcacttccagcccaaggcgctgacattcaatcgccacttctttgcccagttcgccagagccaagcagcatcacacgggttgcgccggggcgcaaagcagttccaatggttaacataattcgatacctacatcagcaagataatatgcgaggaagaaaccgccgcagtatatacgaaaacgattgcgcgggcagcgcttagggcaaaaaacaggtttgagtgcggataaattcagcaaagtaaggtctggagcaatcaggggggcgaagatatcgaaagggatgcatttgacccatatctagggttacaggagaaaaacgcagatttccccgcgcttttttacgctttaactcaagaaaaggcctcaactctgctattatcgccgcaaatattgcgcttgccttcaggcatcgctttcaatccattccgttatataagagttaccgccgtgagcacaacgtccttttcttccctaacgctgcctgccgagcagttgtcgaaccttaatgaactcggttataccgaaatgacgccggtacaggccgccgcgttaccggccattctgaacgggcaagatgttcgggccaaagccaaaacgggcagtggtaaaacggccgcattcggcattggtttgctggataaaattgccgtgggtgagtttgtgactcaggcattggtactctgtccaactcgcgaactggccgatcaggtcagtaaagaactgcgtcgtttggctcgttttactcaaaatattaaaattctgaccctatgtggcggccagccaatggggcaccagttggactctctggttcatgcgccgcatattgttgtgggcacgccgggacgcattcaggaacatttgcgtaaacgcaccttggtattggacgatctgaaagtgctggtgctggatgaagcggatcgcatgctggacatgggctttactgacgcgatcaatgacgttatcagctacacgccgccgcagcgccagacgcttctgttttccgctacttatccggcggggatcgaacagatcagcgcaaaagtacagcgtgagccgctgaacgtagaagtggccgatgaaggcgatgaaccggcgatcgaacaggtattcttcgaaacgactcgtgaaaaacgtctgccgctgctgatctcagtgttaagccactatcaaccggcgtcctgcgtagtattctgcaacacgaaaaaagactgtcagagcgtttacgatgcgctggaatcacgtggaatcagcgtattagcgctgcacggtgacttagagcagcgggatcgtgatcaggtgctggtgcgcttctctaaccgtagttgtcgagtgttggttgccaccgacgtcgcggcgcgcggtctggatatcaaagatttggaactggttgtgaacttcgaactggctttcgatccggaagtccatgtacaccgcattggtcgtaccgggcgtgcgggcatgagcggacgggcagtcagtctgtgtacgccgtcagaaatggggcgtgcgcacgcgattgaagattatctgcaaatcaaagtgaaatggacgccggcggagcaagtgagccgcagcgccaatgtcatgctggagccagaaatggtgacgttatgcatcgacggtggccgtaaagccaagattcgcccaggcgatattttgggggcgttgaccggcgatgcgggtttgacggcggctgacgtcggtaaaatcgatatgttcccagttcatgcttacgttgctattcgcaaagccagtgcgaaacgggctatacaacaattgcagcaaggtaaaattaaaggcaaaaactgcaaggcacgtttgttaaaatagtaaataacgatttttacggggtagcgtgtattgcgttgctccgtttcagccccttatattgaatgttaataactgacggatttactgtttaagttattgaatttatatatttatttcgtttgtttgagctggccggaatcattccttccgctcaacggaatgactatttaaccgcatttaataaagggaatgtattaaatatgatacctgtcattaatcagaccgcagtatttttccgcccagcttctctttcttcttcctcggttaaccctaatgattttgcacccccaacaggtgagataaagtccgcgctggatcagcatattaagggaaagcaggtgctggtttttagcggcttttccggcatggggtacgacgatgttgaagcgtttcaaacctcacttgaatctacattaaaagaggccagcctcaaccacggaaaacataatgtagtggtggtcgcgggggcgaccagcgtaggtattggagcggtttattcgctagcaaaaaaactcgaaattaaaacgctggggattgtttctgaacaagccaaaggcggcggtgaaatagccagtagttgtgacgatgtaatttatgttcctgataaaaaaggcagttggcaggtgctctactatatagataaggcgaagggattaacgggttcatatatgacttatgtcgcctcaaaagcatcgccagcttcaggtggtgagttcttcgcttttgggggcggagacgtgacggtgagtgaacttaaggaagcgaaaaaactgggaataaccacgcgagtttatcctgatttccaacccaatcgggataaagtaaaagagcgccaggccaataaaccgggtagcgatatgacgcccgtgaaaacttatatgactcagtttttggaataaagcctgaccacatttttcggtagcggatgccaatccgggtttgagatccgtatttacgaaaatcgtgttcgctaaatgagtgttcatcaatttgccgttgaatgacttcgaataatgggaagcgctgagccgcaacgagagcttcccattatgttataatttctccggattaaatatttcctgcttatgtatccgccacttatcgttttcagaaatccctattattggaagggatttcgttctttcattttgaggtgaataacgcagcagggaatgattaccatcatgtctgagtgtctcttcggggcgtcgcggatattaataaagttacgggttggtaaaaggactctaataaatggccgttgaagtaaaattcgttgtagtacgacagggtgaggaaaaaatgactttcacaaccaaaaaagaagccgatgcatacgataaaatgttggatttggccgataatctggccgaatggttgtcgcagtcccctctgacgatggaagaagaacagcgtgaagcgctgagtttctatctggctgaaaataaagatgttttatggcagattttacgtggcgctgctccaaccgcagcggcggagcctgtggtgaaaaccaaggcagagaaaggcgctgccaataagaaaaatgacaaaaccgaagaaattcaagcggcttaatgagttatctcccggcaaaatggggaaaaaggatctagaatgaatcgtgaaatcaccttcttcagccgttttgaggcggatattctggcgaatcgtaaaaccattactattcgtgatagcagtgaatccgattttcaacccggtgaagttttgcgggtttgccgcaatgaggatggcgtatttttttgccacattgaagtgaagtcagtgacgccagtgacattggacgcattaactgaacgccatgcgaagcaggaaaacatgtcattggatgaactgaaaaaggtgataaaggagatctatcccggtttgcagcaattttatgtgatcgaatttacccagtgctagttctgtaatggaattcactctgtaacctacaacgcgatcttttgctgcacctccggatagaaataataacgattggaggagcaatgaaaaaaacggcattcactttgactgcgatgatgatggcgctgggtagcatggctgcatcggctcaaaaccacgagcaggagcaacgcactgcgaagttccccgcctgcgtgggattgactcaggccaaggtggcgactcaggtgaaacgtgactttttgcaaaatcgcattgtccgttgggagtctgataaaaagctgctgggaaccgcaacgccggtggcctgggtgagtccagatgatatcaatgggaaagacgatatctgggaagtgccgctgacggtgcgcgggaccaaagcgaataaaagctacgacgtggttctgaactgcgttgaagggacgataacctacagtttgccgcagtaacaggttaaatttagacaggttttagtcgctcaggctattttgaatgacagtgtccgagtgccgctttctgactgaaatcccgattcgcaggaacggcattcggcgctgattatagtttctccgaattattcaacgactgtttacgttgcctctcgatacacctcttatttatcatatggttaccacgacatcggatttgccgaaaacgtgcaggtgctcttggcatcgtgcgttaatcgtgtcactctggcaaacatatattgatacggataattcacagatgatcacacctccaaaggcggccaagcgccctcataccatgactttgcacggcgatactcgtgtagatgattactattggctccgcgatgatgaacggagcaatcccgaagtattacgctacctgcaggcggaaaatgatttcaccgaagcggtgttacagcctcagcaaccgctgagggaaagcttgtatcaggagatggtagcgaggatccctcaacaggaagcctcggttccttatgtgcgtaatggatatcgttaccaaactcgctatgaaccgggcaatgaatacgctatttacgttcgccaacctaaagaggtcaatgccgaatggcatacgttgctggatggcaatatccgtgctgcagacagcgagttttatactttaggcggtttggacgtgagtccggacaatcagctactggcggttgccgaggattttctgtctcgccgtcagtatgatattcgcgttaaacaaatcagcgacgatcgctggcatgacgaagtcatccgcaatacctcgggtaatttcgagtgggcgaatgattcgcaaaccctgtattacgtgcgtaaacacgaaaagacgctgctgccttatcaggtgtatcgccaccgtatcggcaccgatccagagcaggatgagcttatctatcaggaacaggacgatactttttacgtcagcctggaaaaaaccacctcggagcgttttattctgattcacctcggtagcaccaccacttcggaaatcctgctattggatgccgatgacgctgaggcgatgccgcaaatgtttgctccgcgccgtcaggatcatgaatacggtttggatcattatcagcagcatttctatattcgttcgaataaaaacgggaagaattttgggctgtatcagagccagcaggctgatgaaagccaatggcaaaccctgatcgagccacgagttgaagtgatgctggaaggcttcagcctgttccgtgattggctagtggtggaagaacgtagtcaggggttgacgcatctgcggcaaattcactggcgtagcggcgaagagaaaaccattgccttcgacgatccaacctacaccacctggcttgcctacaatccagagccggataccgcgctgttgcgttacggttattcctccatgaccacgccaagttcgctgtttgaagtcaatatggataccggcgaacgggttttgctgaagcagcaggaagtgaaaaacttcacggcagaacattatcgcagtgaacggatttgggtgagcgcgtcggatggggcaaaagtgcccgtttcgctggtttatcatcgcgatcactttaagccggggactaacccgctcatggtttatgcctacggttcctacgggagcagtatggacccagcgtttagcggcagtcgtctgagcctgttagatcgtggttttgtctacgcattggcgcatattcgcggcggcggcgaactggggcagcaatggtatgaagacggtaagttattcaacaaaatgaatacttttaacgactttattgatgtaaccaaggctttaatcgagcaaggctacggcgacgccgaacgagtgtttgctatgggcggcagcgctggcggcttattgatgggcgcggtgatcaatcaggctcctgaattatttaaaggcgtagtagcgcaggtacctttcgttgatgtggtcacgaccatgctggatgaatctattccgttgacgactggcgaatacgaagagtggggcaatccgaacgataaggcttattacgactatattaaacagtacagcccttacgatcaggtgcgcgctcaggattatcctcatttactggtgacgaccggcctgcacgattcccaggtgcaatactgggaaccggcaaaatgggtcgcgaagctacgggaaatgaaaactgacgaccatcaactgctgctgtttaccgatatggactccggccacggcggtaaatcaggtcgtttcaaagcctacgaggatatcgcactggaatacgcgtttatcctcgcgctggcttaatttacctatgattccagataatgcgttagggtatggcgcatgtctggagtcaggtctttcaccgatttcagcatccaacgcagatagtccggatcttgctgggctatctgttcaatgttttgcccacgatacttgccaaatttcagcgtccgtaacagcaggggggcctgcgtcagctcaaccattttctcagcgctccaaccggagtctttaattatgcgttgcagcagggcggcggtgatatagcagtcatataatgcgcggtggggataaagattttccggtggcgtaacttccagtcgcagggcataacgcagatattgattactgtatttgatatccggatacagtgctcgcgccaatttataggtacaaatccactcaccgcccatttccggcaagacacctcggtcaaacggggcattgtgcgcgacataatattgactgccttgatatcggccaatggctttagcaattcgaggcttaccttccaccatttcttcggtgatatggtgaatggccatagcttcaaggctaattggccggtccgggctgattaaatcactgatcggattaacgattcgcccatcaatcagatccaacgaagcaatttcgacgatcccgccgtctaacccgcaagtctcagtatcaataatgcgaaaattcatgtgttctccagagactggccattattcggttttatctggcgatcataatagactggccagtccctgccaactttcttcagtcaggcgggtaatcaccagagcctcgtgttaccgctaatctgggcgatcgcgttgccttgttgatcccacactgcgcttatgcccgcgccgattttagccgaataaattaagttataggcaataaaaaacccgcctgagcgggttaacttaacgtgatgaaaaacctttactctgcgctggaagaagatgccttcttcgcacgtttctccgcctttttttcggccggagttttcagtggttttttcttcgcgttctttttgctgtccattcccttactcatggtttgcctctctatgaccttcggttaggttggtacgcatcttcattaaggccctaatagcgaatacttgcaaggagataaagtcgataaaaggctaacacgctgttaattataatgattattaaaatgtaatacttgatattaacgaggaatagcgacattaacatcctttgccagtgaaaccgatgtaatgatcggttatggaatctgcagcgcatttcctaatgattgactcatcaacggcgataaaaaatgcgcgatagggatcgtataaccggtatttaaatgattaatcagctttatttgacctctttagtcgttgaccctgcgtcaggcataggcttttatagagaggtgatcaataacaaaaatggaaaatgcgatgggacaattacggggactctatccggcttatgagccttacgattgcggctggttggaaaccggtgatgggcatagcatctattgggagttatgcggtaatccgcagggaaagcccgcagtatttattcacggcggtcccggtggcggcattgcgccatatcatcgccagttattcgatccaaccaagtataaagtgatgctgtttgatcaacgcggctgcgggcaatccagaccacatgccagcctggataacaatactacctggcatctggtggaagacattgagcgtctgcgcgaactggcgggtgtcggtcaatggctggtgttcggcggttcctggggctctacgttggcattggcctatgcgcagaagcatccggagcgggtgagtgagatggtgcttcgggggattttcaccctgcgcagagaagaattgctttggtactatcaggacggcgcatcccgtttcttccccgataaatggcaaagggtattatccattttatctgaagaagagcaaaaggatgtgatcgcggcttatcgcaaacgtctgacatccccggatcgggctgtgcagctggaagctgcgaaattatggagcctgtgggaaggggagacggtaacgttattaccaactaaaagctcggtttcattcggagaggatgattttgccttggcttttgcccgcattgaaaaccattatttcacccataacggttttttggcccatgacaaccagcttctggatgatgttccattaattcgtcatataccgacggttattgttcacggccgttacgatatggcatgtcaggtgaaaaatgcctgggatctggcccatcgttggcctgaggcagagttacatatagtggaaggtgccgggcattcattcgatgagccggggatattgcatcagttgatgttatcaacggacaaatttgccaaataatcgggttcccgcaggctaaacgctggcgggaacctttcagtcgccttacttaattttaggctcataaggcaaacgtgagaatttattcgattcgctccgatagtgcgcgaggcgctgcaaaaagtagtctcgcaggttttccgtctgttcacgggcaaccagttcagggatcactggcatgttatagcgttccttaaatgcaacgcccgatgcagctaaatcgacgttcatttttgccgtttcttcgtcagaaagctctgccaagttgtaacccatcgttttctcctctttcgacttaagcggcggattgtatcaaatcagcgttgaaaataatgcaggcatctccctatggcaagagggtgtggataacggcagagaggaatgtagagaagaaatagcgagccaaataataaatgagaatgattggcgtttattttaaataataaattaaaaataagaatgattccttttattattggcgggcttgttgataatagttatcaaagttatttgcccactttttcccagattaattaaataatttatttcctcatattaaacatgcagttaatacaatttgttgttttaatctttttaaatgtgaatagggtgtttttattttgtgtttatgttggcataatacgtgaaataacctcctgccaacctgcatgataaaaactagggactaattatgttgaagaaagaaatggctcaaaagctcaatgagcaactcaatttagaattctattctgccaatctttatttgcaaatgagtgcatggtgcagcgataaaggttttgaaggtgcggccgctttcttgaaagaacattcgcaggaagagatgcagcatatgcagcgtttgtttgaatacctgagcggcacaggttcgatgccgatattgggcaccatcagtgcgcccccggtagagtttggctcgttagctgatgtcttcaagctgacctatgaacatgagcaattgatcaccaccaagatcaatgaactggcacatgttgccatgactacgcaagattactcgacgttcaacttcctacagtggtacgtttctgaacagcatgaagaagaaaaactgttcaaatccgtattggataaattggctctggtgggtaacagcggtaattctctgttctttatcgataaagatttgaagaacatggccaccagcgcgcaaatccattctcaaggttaattctatcttttgagctataaccgcagtttctctgttatcgacagaggctgcggttttttattttgtgtcatccctgcctgaaaccatttcttgtctgtgcctgtaagctcgacttcatactctcaactcattattattcatggctaacatacggaaacggatgacttcaagtgagcatccggtggcttttcgaccacttatccgatgtcggcagtttattttgtgtggtatctcacatgtagtacatccaactggaagcgatcggggtttacgccgccaatatagggtaaagttggtagcagcgatttttttaccccaatttatttaagggactttatgttaattaacaaagtacgttcatcctgccgcatgctttctgcactggttgttttgtttgttggcctttccagccagcaggctttagctcatgctcatttgaaagtggaaacccctgccgccgataccacggtaagtgccgctccagaagcgttaacacttaatttttccgaagggatcgagttgggtttcagcggtgtgaaggtgacggggccagataataacgcggtgaaaaccggcgctttaaaacttgacccggttaataacactcagttgattttgccgttggataatgcgctaagcgcagggaagtataatgtttcctggcatgtggtgtccgttgatggccacaaaaccaaaggcaattacagcttcactgtaaaataatatgtctttagcggccttatttgtcctgtgtcgctttgtgcattttatggcggtgatgctgatgtttggtgtcagcgtattcaccgccatattgtcatccgaccgtttcgctctaacattacaacaacgccttcaacccttgctggctagcagtacgctagtcgcggcattttctgccgtcggcctgttgtccattcaggctggaattatgggcgatggatgggcagatacctaccagtttcccgtgtgggggttagtgctgggcacgcgtttcggccaggtttggcagtggcatctcgcactgtctttcatcagtatcctgctgttgtttttcaatcgaaaatcatatttttcggctctgatggtcgcctgttcgtcgctgttactggctagcttggcttttatcggtcatgcggcgatgcatgatggcataattggctggatacatcagtcgaatcaaattctgcatcttttcagcgccggttattggttcggtagtcttttacctttgctggtttgcctgccctatacccgcaatagtcagcataaacccgccgctatccatactttaatccgtttttccagttggggtcatttggctgtcgtgctggtggttgtcaccggaatgattaatagtttcattatactgcgtggttggcccctggatttcacctcgacatatcagagattgctttggtgcaaaattgtcttggttgttttgatgattatcattgcggtaatcaataggtatcgcgtggttccagcaattcgtcatttaccggaaaaagcgcactattggctggtgatgaacgcttggtttgaggtggtactaggggcggcggttctacttttggtgagcacctttgctacatttgagccggtataagcggctagagggctaactagcagggaacaaggcttgcttctttagggttagatgcaggaaaatcaggtcaatcagctaacttaggaatagttaacatgaagggtttcgcgctaacgctttctcttttgcttctggctgctaatgctgcggcagcatcaaagattatcacggtcagtaagtttgaatttggcaagcaatgggcattcacgcgtgaagaagtgatgctggagtgccgctcaggtaatgcgctgttcgtgattaatcccagtacactagcgcaatatcctctcaatgaagtagcaactgagcagatgaaatcaggaaaagtattggcttcatcattagatccgttggttttggaagacaaagataatccgggcaaaaaaatgagcctgcaacctttccagcaacgagctcaaactctgtgtgaaaaatagggcgaaagcggatatgcccgccgggatagcgtttgaataatctcataattaccagtggactaactaagaagctattagttaacctgagtgattattaagttattatgtcgaaagttggtaaaacgtgggtcgtctactacgcttaagtagtacggctgaataagcctgcatgaaatgccaacttttagcgcacggctctctcccaagagccatttccctagaccgaatataggaatcgtattcggtctttttttatctgattgtttttattgatgttttttctctccgtccgaaaatgtccgaaatttgtccgaaatcctatactcggcctaaatctcaacccactcatttttacgtgaatccaggtatacattcgtcattttcatcgacttgtgaccaagcaatttctgtgcaaattccttaccgtattctgcttcataaagccgcgatgccaggctgcggatttcatgaaaactgggcggggagacttcataaaccagatcggttgccttcaatgctttaacaaatgctttggtgagcgagtccgcatttaatgcaccgggctctcggcctgattttctactggacgagcaaatgagatattcgctcttattgttattcaggcattgttctacaacgtcaccgacggaggtattcattatttccaaccgaagtgatagtgatatagctatctgcattttagttttactttggactatccaaagcttgccatcatgcacgtcgcttctttttaattgccgcacatcgtcacggcgttgaccggtaatcagcgccagtgccaggctgagttgaacccagttctgttgttggccggcagcctcataaatcttgcaaaaggcttcatagtcgagccgctctcgcttaacttttggtgacggcgtacgggttgcttccacaggattgcggctaattaatccatcagctatggcctctctgaaaacgtctgataaaacagagcgcaaattaaccgccattgaacttttaccattatcgacataggtattaataaaatcagcgatatgcttggtggtaacggtttcaatcggcttatctccaaattcttggttaatatatccgatttgcaggactctcattttcatggtgttatcagccagctcccgacgctttaatagtcctcatgtattggccacctgaatagaggtgatatgctcacctcagaacaatacaggtgcctcaatgaaaaaaagaaattttagctcagagtttaaacgcgaatcagctcaactcgttgttgatcaaaactacaccgttgctgatgcggccagcgctatggatgtgggtctttccaccatgacgcgatgggtaaaacagctgcgtgatgaacgccggggaaaaacgccaaaagcttctcctattactccagaacaaattgaaatacgtgagctaaagaagaaactacaacgtattgaaatggaaaatgaaatattaaaaaaggctaccgcgctcttgatgtcagactccctgaacagttctcgttaatcgggaaactcagggcgcgttatcctgtggccacactctgccacgcgttcggggttcatcgcagcagctacaaatacgggaaaaaccgccctgaaaagccagacggcagatgggctgtattacgaagccaggttctggaactgcacagcatcagtcatggctctgctggtgcaagaagtatcgccacaatggcaacgctgagaggcttccggttggggtgatggctccatgaaagaactgggtctggtcagctgccagcaacctgttcatcaatataaacgtggcggtcatgaacatgtcactatcccgaatcatcttgagcgtcagttcgcagtcacagagccaaatcaggtgcggcgatgtgacatatatctggaccgggaaacgctgggtatataaaaatggaagcaatacgctgtctgaagcgttatatctcacgcgaagtttatacattactgcgaaatcaaaacagacagatcaacagcatctcgataacggcttgactcttagaagggcgtccagggtagccactatacaagcaggcagttccgacagtcactgtggcggtaccggatcaggcaaagtatgagtcgccgtggaaactgctgggataatagtccaatggaacgcttcttcagaagcctgaagaatgagtgggtaccggtgacgggttacataaacttcagcaacgcagtgcacgcaataacggactatatcgttgggtattacagcgtgctcaggtcgcacgaatataacggtgggttaccgccaaacgaatcggaaaatagatactggaaaaacgctaaagcggtggccagttttagttgaccactacaaaacgcgtatcgtcgtcggtcgggtcgtcttcgccatgatctgctggcgggttaatcgacgtgacttcaatgggattgcttggcgcaggaataccgagccgaaaactggccgcaggataattacctctgccttgggtcgcaatggcggaactggttaccttggggtattcgccatcggtaaaatacacccgatcatatttatcctgagcgattgggctatgtatcgcatccacctgtccgcgccaggcaaaccagaaattatcccggtaacggaatattgtctctggtttgaaggcaaaggtttttccgccgtcaccatcagccatcattggggtaattacgccgtggcggaagtggcaattacgggcaaccgtggcggcttgttcaggtaacagatgtgcgaccgcacgcggcatttcaccacgcatggtcgtgatatcaatagcgggcataatgagtgatttccgacaggcataaaaaaagccccactaaaaagtgaggcttggcatctttgggtaatttagcgcgtaacctgttcggcatcaatgatatcgtcgtttttttcgcaaccagagcatcaaacaacgacggataacacgaaaaccatgagcgagccaacatccaccttatcaataagtatacaatttgatagtattgtaaaagatattcagatgtattttgtgagttcggaattttaggtttttcaggaaattaacgtaagggaattatgtggctaatttaatttaatttatttgactataaaaggcgaaaaacaggggcttatctctgctggatgctcaacttatgactcaatcggcaataaatttcaagccggtcatactgaccaaataatggtctactcactgactcatggtatcaaccgggctcagaatgcgactcacttacctataaatatcgttaaaccaatagataaggcaacgccattattaggcaccgctatttctgataatgaagttttgcatctgacgttgacctctacagaacatcaagtaatggtcatcaagaaatctatttttccattgaagttagaaatgccaacatcaagcatgttggtataaattacccccatattatgaccaataaagatagccaacccgaagaaatgctcagtgtcacctaccaagatataaaatgggtccatcacgcggcaggaacgacaggttatagtttgtgggaagatagggtttattaagccgttatgacagtgactggtagtgtgccggtacatatatagatattgtctgctgtgtaccggtatttttttatttcttttctgataaatcttcccaattagttgagctgccatttatcaattgatagagggaaagaccgacggtagaatcgccagtcacttcgctgatgagtccggcagctcccatgtctctccatccaataatataatcctctcttatatggtggaaaagcttccaggcatctttttttagtaccgacctgaacagcgaaccggcagaaagagaaagatcaccgatggagaaggcgatatcaccgtctttatcatcgccgcccagaatccttgccgactgccggtatacgtttcttaatggtactagactaggatcttctcgatataaaagataatagccattctcccatacgttctctgaaccatgcaaaagtaaaggacttcccaaataggagcatgctgcccctaggctggtataacaaatccccccgccaccaattatttttaaccatccgcttacaaaaccaacctgtttcaagataatattggttattgaattctgttctttttttctttccacaatggcatatagcttcgcatttcccatatgaagagacatgcttacttttaaaagagattgatattggtcatgaagttttgtattggcttcggaaaattgaagtcgtcctaatctataaccagtaacgctggcttctgccatttaatattcatcgaaaatgaaatcactaataacggccccattatttaaatattgataagcaacatctctagccatgcggtttatcttttctcgctctctttctaatgccataatcgcataactatccatgctatctccctcctaatgaaaacaatactttaaaactccagaataattttttgaaaaaaggagtaaagatgtacattataacaaggcctggtaggtatatagcactaaatgttataatttctctactatccatcttattgatgaagaataagtaagtcagtattatacatagcgaataccaatacaaaccggataagcttaaaaaaaattgccagctaacgcttgtttttttatatttggcgagtttaattaatgtgccagcatcaatttgtttcattcccagcgcgattagtttgtttttttagctcgacatcatccatatgtttaattccttttaaaaataagtatctatgttagataaacgtagtcgttcgctttaaccagtttttatccaacgggcgaaagtttaacctcccccctctccaaccgcaaatctacccaccgcccatggggaatatccaccgcctggccattgctgtagccgtcccgtttattctgggcaaatggcggtgagttggggtgttcgcggtgataagtgcggatggtgataacaccagattcatccacttcccgttctaattgagcgtgaaaagcggattgtcttacaggccaaacactttatgcgagttcgtaattaaaccgaagcagaatcacaacgggggcaatgaaggttaacgcaagccatgagaaaacctcaaaagatcgcaatgtacatcaaattcacacaactggagtcattatcttttagaataaagattcaccgtcttctaacggtaatgttttcggaaagaagcactttatgttctatcgctgcggctaaaaggagagttagccacttgttttgttcatgatcgaaaccatcaacccgatgcgtttgcggcaatttttcgttggccggttgcatttttacacgacagctactaggccatgctgaaagcatgaggacagtacggcctgataatgtctaaagcgtgggcaaggttgacggaaccgtctcagcgttactcaggggcttcatagatattgacggtcatagaactgaagatggagtaatgtttattaaataccgagctcatccagttttcaaactcaactgtggaggtgaaggataactcgccgaaatttggatccataaagcggatatggtcttgctcatcttttatacaggcgacggcatgtcctggtccatcgtctggggtgagtagataacacatgttgtagcaccccttttcgtcattgcgtgctaggctcatcgcttgggcagcgaattggggggtaaagtcttcgttgttcactatataagtaccaacgtgattgaagtgatccttcagttcatactggattctggtttgtgcttcagggggcggtagggggtgatagtcatcgttaagatattgagataatacctgccatttggcagatgaatcggcaagccaagcgtaaaaaccctccccctgtgaattcttgacaagatactttgccgacatggccatgcagacgccgttatcggtcacattggttttaacaccaaacgcctcattgacgctcttggtaatctccgattgattgtagctggtttctatatgaccaaagatcgtattctgattggtgacattgtttatcatggctgaatctctacgtccttaatgtgctttatttccctgagttctctataacaagtgaaggggctcaggttggttttacttaataatattagaataatgagagttccactttcatatttcgtccggtcttgttgcaagaatcggtaatgactccaattgtgtgaatttgatgtacattgcgatcttttgaggttttctcatggcttgcgttaaccttcattgcccccgttgtgattctgctttggtttaattacgaactcgcataaagtgtttggcctgtaagacaatccgcgtttcacgctcaattagaacgggaagtggatgaggccggagttatcaccatccgcacttatcaccgcgaacaccccaactcaccgccatttgcccagaataaacgggacggctacagcaatggccaggcggtggatattccccatgggcggtgggtagatttgcggttggagaggggggaggttaaactttcgcccgttggataaaagaccgatgaaacatattggccgatgactacatttatccagtataaacactgattttttaaaaggacttaaatgtatggatgagcaagaaataaaagacaaattggttggtcttggcattagtagtttagatgcaattacattgataaaaattgcaaaaaataaaaaaaccactgtaactcgagtatttatttcaaatcatatagggctatatattggcacggcggcattggttggggtttattttttatttgcaagtacaatgagtgagaaagaattgatttcattctctgctgcttatatacctgtgctgtttataatttattttttaactccgttcttgaaggagtttttttggagtttaaaagttttattctctttgaaaggaatgtgatatgagtagctttactctttctgtcttggaaagaaaaaaagaggaaattaatcgtatcgcagtaaatgtcgcatttttatatttgagtgatataaggctacgaagcgggtttatcagcagtaaaatcaattggcagacaataacattagtgaattcaagctagggagattgtcgttcagtgaggttatgtctaacctccatgagcaatacaaaattcttgaagatagacattttgatttgatgcttgataatgctaagttatttgttattgccgaaaggaaaaaagaacaaaattctgcactgaacattatattaaagcaagtagggtttgttagcggcgggttgcagatagttggcggggccggaatatgtaaagttagcttgggaatggcatgtgcttcattaggtgtccattaatagcccacggagcatcaaacttgagtgaaaatgcacactatcttttattccgtgaagaaccggaggcaagttttttgcggtatgcctatcagcatactgctattgtgttaggaggaaccaatcagcagggagatatagcctattttgcccatctctctgacccgaaatgtcttccgtcgcctgcattatcccatcgatattattgttcagtgtgtcccctggtatctggcttactcactgagtttacgcaaccaaaaagagatgatggcagagcggggtattgtcgttgatcattccatactgcgtcgttgggttatccgcctggtgccgctgttagataaggttttttgcaaagctattcatcatcacggcgaacccgagagggcggcgattgataaaagtggtgccaacagcgcggttttggctatgctcaacgcagacaaactcgatgaggaaacgattaacctaagacaaagcaactatctgaacaacaacgttgagcaggatcactgcaacatcaaacgacggatacgacacatactgagattcagctcatctcgacgggaaaagacaattctggccggtattgaactaatacaaaagggcaatacagaacctgcaaagtgagggattatcatccgcggaatactcaataatcggtaacgcaacttttgccaacttcatgtcactaatgcgacagagccctataaagagccattttgctgaaaagtgtctcaataaagtttagatgtggaaaacgtaacgtcgggatgagacaaaacaaactcagtgagacaaaaatacagtctcactgagttgtctattttaggtttactcaaacaggataacagctactccttctctggagtggagtattttatcttactaaaaatgaaactctcaggggcggaaacataatcctggtaagctcaatatcactatcctgttattatgaccggggtaacattctggctttgatgatatatcggtgagatgttccatattgttctgggttgtccatataagaccttccttcaggaaggtattgtaaagatgttatcttcatcctgttgtataatggaaacgtcacttcaccctcggaggcatacaatccttcagaaacaccggcgtgtcctggctcaagatcaaagtgccacataattgttttacctgacacataacccattttaggatccttagctgtagacattatgaggggagattttatttctaaatccattgatttttgtacagtatcgctcttaccttcagattcatttataaactcagcaagccaagaataactattagatattactggcgtgtctccacggaaggtttcgttcacatctgctgaatgatacccagaccattcagcatcaattttgcccagagttttctgaacctctataaacttgtcgtgactaatatctcttgctgccggcttcatgtttctaccaatttcagcccacttgcttataaagttgtccatatcgataattgaatcataatgactgatattaagcttctgtaaggctattgtgaatgaagaatagtatggatattcccccccttgctgtttatataaagcggggtcttccttaataacccagtttttctttgctccattttgctgcccgggcatcgatggtggcggcggagggtttcctcccgccaccggtggcggcggcggagggtttcctcccatcatcggtggtggtggcggtggatttccccccatcatcggtggcggcggtggaatcatagtattgatagggattcttccatcattgtccttccacgccaccggattattccgcaccatcctgtacagattcagcccgtccaccgagcccgccgggtctgcacttagccatctgcccgcccacggttggtagtaccggtaaccgtagtagtacagccccgttgcgtcccgctccttgcctgaatacctcacggtcttgtagtttgcctccaccgcgctgcgaaccgtccataccgctgtcccgccgtacggatagtattcctccatgctgataagtttgccgtcgctgtccagctccagcacgctactgccggtcaggttatcgtaactgtaacgtaccttgtcgtcagtgattccatccggcctgccgctctcccagtgcagcatccgcacctgcgcacggctcgcctcacccacagtgataacctgcaggctttccgtttccgtatcgccatttttcgcgctgcgcagttccaagcccggaaggtacagcgcccgctgcgtctgcgcgctgttaccggttttctgtacactgaccttcagaatgcgctgactaccgccgtcatagcggtaattctcgctgtcatccgcactgccatctcgcatcaccggcgttaccttcaacagctcattacgtgccgtccagaccaggcccagccccggctgtagctgcgtctgctggccgcccgcagtgaacagtgcgtccacgtctgcggcgttttcggtcaagttgctaagcacagcccggttgctgcggttgcttacggtgatgttggttgtgtaaccactgcgtgttgccggggaatggcgtatctgcgtcaggttgctggcttcgtcgtaggtgtaggtgcgggtgtaactggtatatgcggagctgtctgtaggaaaggggacggtagctgacggtaaacggctgccctgctgtccgacgtttgccatctcgcgcccggtggcactgaccagttggtacaggctgtcgtaggtgtaggtattttccggcaccactttctgattactccagaagcgggttgcttcagcatcattggtgattttcagcacgttgcccaccgggtcatactcatagcgcaggtcctgcagcaccttggcacccgaagcgtggccggcaggtcgctccgtccggatgccggtcaggcgctgcgtctctgcctcgtacgtgtacgtgatcaccacgccgttgccgtgatcctcgcgttgcttctgcccggcggccgagtacgtcagggacttcacgataacctgttccgtacggtccctcaccgtcagccaactgcctgacaacagtcccgccacgtcgtacctcacgcgctgaatattacctttcgcatcggtggtggtcagcaccgtcccggtggcgtcagcagtggtcagggtgacatactcctcgccactgagcagatcattccatgcagaggcaccttctccttgccagtcagccacggtgtccgggttatccgcgtccttcagcagacggcgggtgacggagagcgagacgcctgtcagcgctatgctgtctgtctgcaccagtcctgccgtatcgtaatgacggacgcataatcccgccaggttcagagtcttctctgcgccagtattgccggcatacacgaagcgctccgtgatgcgggcgacttcagtgctgatctgctccgtcacgttcagtggtcgacccggaagcgccgcatcctcatactgccaggtgcgggtcaccgccaggcttctgtcctcagtgccctcatcggtggcgctgatatgactgaccacgataaacggtcgtccggcgacgtcgttcagactgacgctagtaccgttatccgccccctgtgtacgcagaacgcctccggccaggtccgtcaggtagctgaaatttacgcgaccggcgtcgtgcagccgcgggtcggcgctctgcgtcagaaagccgcgtgcgtcgtactggtggggtgtgatgcgttcatttgtcacctcaggggcatcagggtggcgatggtacgcgatgtcgcgcgcggtcaggccgcggttatcaaagaccgtgaccttcggggttctgctgaacaacgatgtgctcatggtattctcctgtttatgatatgtagccggtcaggctgcacaagaaatagctttgtcgcagatttattaatggtcaacgacaataccgcgctctgccatcatctctgttgggttgcgtaaactcagtgagtaaaccagatatccgcggccacactgaacaataatatcgatgggataatgcaggcgacggaagacgtttcggatcagagaaatgggcaggtaatattacaaaaaaaacagcatgttatataacaatgccttaatgcgacagagtctccgcgagtgcataaaattataactaaaatagaatctgcacctgatattcaaccacaggtgcagatgttatttattaaaaattaaaaattaaaaattaaaaattaagctagctgttcaagtcgtaaattattaatgaccttatactcctcggcctcgcccggataaatcatgagaatatccatcggtagatcgatgcccggcgctataacattgccctttgtactatcaaggaaacaccaaccattgaccgacttatctgtattcagctcaatccaactgctgtttgcattaagccaatcaacatcaaccatcgcgccttctggcaataagaaggagagctgccagctgcgaacctgcaccgaagatgaagtcaggaggaaatgatagctatacaaaaactctggtttatcccattgcttacgccagtgagatttatactcttgtgaaacatccaaatcgcgctgctccgtcacctgaatcaccgagctagcctgactgtcaccgttatttgtgtagccgtttggcatggtgagttttgctgtcatcgttgccgtccctgggttttcgcccatcaacggaatattgatattgacagacttgccggcggaaatatcaacggacggagggaaatatcctactgagacaatcgcagaatcggataccgttacgccaacagaaacccctttaatatcagatgattcagagttagaaatgttaagtacattgtaataggtttcgtcactggtcagcaccaaattggatgccacagacatcgtcaactcaacgttaatggcagtcacgctaacccgagtattgatttggttagcaccactattaatcacgccaataggcgtatgcagttgggaagtcaacgaggtcgagccaatcgatttacccgttaaagggattgaaaccttgacagagccattagcgggaagagtgccaattgcggcaacatttcctacagaaacaacattgttgttagcagaagagacatccagagttaacccactcacggcaatattacttttgtttgcaatagttaattctgcaacataggctttgttcagtgcaaaactgatattttctagggacatcgtaagattaacggtttctaccgggcgtgcgaccaccgactgagttgcatcattccaggttcccttgcccagcggatagctaaccagtgacgggatactttcaccggctgccaccgacagagtttccccgtccagataaagtccggaaaccagcgtaccattctgcgacattttgtttacgacactggagacgccatcatgaccgcccacatagaaaccgtacgactcaagctgctgtcgattaagttgaatatcacgtgaaataatgaggatatcacccaactcctgctcattgtaattaatattagtgtagagtgctattttacccgctgggcacttgttttcaccacgagcatttttaataagctgaatatctgacataataatagtccttgttctgaataagtaagcggaaaaggcaaaggtatgaaacctctgactaccgcaatatgattaggtaattaaaaattaaaagtagaacgttacaactgaaccaataacatactcggttcaattaattaataaaggtatttgcgggaaattaatagtagttaattacttatttggagcttgagggcattttataagacaatcattttttatataatggttccatatcaattgctcggactctttcgtattaaggtgctgtcatataatatgctgttttttgtgatattacctgcccatatctctgatccgaaacgtcttccgtcgcctgcattatcccatcgatattattgttcagtgtggccgcggatatctggcttactcactgagtttacgcaacccaacagagatgatggcagagcgcggtattgccgttgaccattacatgttgggatgcagcttatttcgacgggcaaagataatcctggccgggattgaactgatacataggatacgaaaagggcaatacagaacctgcaaagtgagggattatcacccgcggaacactcaataaccgataacgaaacttttgccaatttcatgtcactgatgcgacagagcacaattccaggcaccagattttaggggtgaaccattgacaatgagaacatctgtctgctatttcatttgccaggttttacctcccgtaaccgtacgatatcgggatggagaatctcactgtaactcaataataagtaaagggaattagtttatgaagaaatcatttattgccttatttctaacattctcaggttttgccacatccgcgtatgcacaagatgaattaacttatagcaaactgatgatgaatccagatataaagacagagtttaaaaagatgattgggaaacaaaagttgcctaagtgggtcacagaaggcggcacgtattcccctggctacaacgttgagatcggtgggaataaatatgtggtaatgacttcatgtaagccccatgattgtgcttcacaacgtatcgctgtgctctattctcctgaatcaaaaagattagcaggtgtattttctaccactgacgagatggaaacaaaccaaaagctgcagtggctgagtattccagatgagttgtctattgatggaaaaaccatcttattcgcggcactgacggggagtcttgataatcacccaaatagctttaacttaaagtaaagtaggtaaaggtggtgggtattcgtctaccaccgtactttgcccaaagcgctacattaaatcaggtcccgttagtgctggaagtatcaccaaagacgatttacaaatatattccagcagccgaacagggggaatgacgttttgtgacgccaccataaagtggattagtcgatacgcaagctgggcagtgccatgtcgtaagatattttcaaacttgatagttggctaagagcgaagagcaggtcttaactcttcgcatccgcaacatagattgtcatcgacttaatcactttaacagtaaccgtacccccagaaatgccatgaatcctccgcttaatttatctataaacttgcggtatctaatgtaagcctgacgtggtcggtcggttgataataagcatgaaacaagtgcataccagagcacatcaataatgaacgccattaaaggcaggataatatacatggcaggctgaatattagtggtaagcgctgcggaaaaaatactggcaaataccagagcggtatgggggttgctgatttgggtaaatacgccagtagtaaaagcttttgatatgctgatatcctctgtgcctactgaatgggtaattctgccggaaggacgacgaaacattttcagcgccagccacaaaagataacaaccaccggcaatcttcaggctcgtataaagtgacggaaccagagtcagcagggtatgaaggcccgctaacgcaatgaccgcaaagacaagcgcaccaaagcccatccccacggccaccgctaatgccgcacgtctcgaactggacatggctgttcgcgcaacgagcagaaaactggctcccgggctcattgcacccagaaggatagccaagccaattgcagaaagtgcaatcaaatcatatgtcataattttactccagccatttaatttacccttcagttctctcattgcgtgatccgcgcacctcatgaaccgagctcaatttcaacataacacgatgtcacccacttccgctttcactcaagcggacatcctggcctattagcttgagtgatgggcattccactcatcacgagtcatttcccacaactctgagtccagaaggccgctgacgaactgtttcttttccgttttgattaggcgcataccgctgctgactgaaatgctctgagaacggagatttttagttgcttttggagcacgcaatactgccctgttcaaagtgttaaaccagtaatctgtcgccgcaagactggcttcgcgcattaatccgcgcccctgatattcaggaaccagccaaaagccacgattattatcttcttcatcatctaggcagataacacctattaaattgtcaggattatcccggtgccgtatggtccaaacccaggcgactccttttgccatagctggcagcgcgacgttattaacatagtgcgctgcaccatcgtcaggatagggccagggaaccgatgccaccatataacggacaatttcccagcgtggaaagcgttcttgaatttgtgatgcatcctcagcaactattggctttaacagtaaacgctctgtttccagcgtgggtacttgcatggctcttttccttactggttaatatatccgtgaccattttttactgattcaatatttactatgatttatagggatgtacagaagatattcaggtaatcgggtggaagaccagaacccgctacgacgaagcgaagtttttgctggcacttgaagcgcgacgctcgcctttacttaggccataaaaagcttgttggatgtctcagggcgtgaagcggacttttagtccaagggtataaatgtatttctgactgctaaaagacatttataaaaatttaatgtcttaccctagagggataaaattacttgatcaaggcatcgcgcatgtggcctgcctcctccaagtaagatgggaaagcgcgtaataatcatttggtcgatcagatcttcattgaggaaattttgaattgttcgcgccccgtttcagggaataacagaaagcggagcggccgcgacgaagggcactttatggctttcccgcagcgtggctcacattcaatgctcaacggtgaccggcctcactattaattaacatactgtggattttgtcatgaccgcttctggcacttagcaggtggtcaaatctaattaacccagagtagaaaagggggcagactaaatactaatcagtaaaaataaatgccctgattcattgccaaaatattttctgataagaaccaatgcctttcctagaaaccgtccaaaagccatgactcagcccttcacaagcgataactcataaattatgctgtatgcatatacagtttgctgggctttcatcatgcgttttcactccctctcgccgctgcgcgaaattgttcctatcccgttgtttaatgcaacgatcccggctggctttcccagtccggcggcggattacgttgataggccaatcgatctgaatgagctttgtattgctcatccggcagcgacttattttgtccgggtgaccggtaattcaatgattggggcggggatttttgacggttcgctgctggtggtggatcgcagcatttccccgagccacggcgatattatcattgcctctgttgccggtgaattcacggtcaagcggctgtgcctgaggcctgtcgtacagttagaagcgatgaatcctgattatccgccgatagttctgcacgatggcggggatgatttggaaacttttggcgttgtccgtttcgttatcaatgaggcatccggtgtttgccctggctgatgtaaattcgttctatgcgtcctgcgaagccgtattccggccagatttgcgcgggcggcctgtggtggtgctcagcaataatgatggctgcattatcgccagaaatcaggaagcgaaggctctcgatatcaaaatgggtgggccatattttaagcatcgacagcttttcgagcggcacaatgtggcggtattcagcagtaattacgagctttacgcggatatgtccaaccgggtgatgactgtgctggaagatatggctccatcggttgagatttacagtattgatgaggcctttctggatgtcagcggcgtaagcaactgcatgagtctggagcagtttggtcgtaacgtgcgggcacgggtattgttatggaccggactgaccgtgggggtcggcattgcccagaccaaaacgctggccaaactggcgaaccatgcggccaaacaatggagcaaaaccggcggcgtggtggatttatccgatccgctcaggcaacgcaaattgctggcgataacaccggtggaagatgtctggggaatagggcggcggatcggtaagaaactcaatctgttaggtatcaaaacggcgctgcaactggccgataccagcccacagatagcccgcaaacatttcagcgtggtacttgagcgaacggtgcgcgagctgcgcggcgaatcctgcttggcgctggaagaatttgcaccgaccaaacagcaaattgtctgttcccgttcatttggcgagcgaataactgactatcaggatatgcgtgaggcaatatgtggctacgccgtgcgcgcagctgaaaagctacggggagaacatcagtattgccgaggtatctccgctttcatcaaaaccagcccctttgcggtgaatgaagcctactatggcaacgtggccagcacccaactctatacgcccacgcaggatagccgagatattataaccgccgccacgcgttgtctggacagtatttggcaggatggtcatcgctaccaaaaggggggcgtgatgctgggcgatttctacggtcagggcgtggcacaactcgggttattcgatgaaaactcgccgaaagccaatagtgaacagctcatggcaacgctggacagaataaaccagtcaggcaaagggaaaatctggtttgctgggcagggcatacagcgcgcatggcagatgaagcgagacatgctgtcaccggcgtacactactaggttgcaggatttattgaaggtgagggcttgatgttgtttggattcataggctgtttttttctgcatatcctgtgcccagtttccggctaggtattcccgctccgagtaatcccaccgagatcacggcgattaatcagtcagccgattacggcgaggatgacccaaccgacgacgatacgcgtttttatgtggaaacctacgtcactttatggttaagaagggccgctggggccggtatcgcaagaggtcacgatcacctatcctggcagtagtgtgggtccgtaccccctgaacatctcagttcccccatttactcagaataaaagggctggctacagtgatgtccagccggtggatattccccatgggcgctgggtggatttgcggttggagaggagggaggttaagctttcgtccgttggataaaaactgattaaagcgagcgactacggttatctaacatagatacttatttttaaaaggaattaaatgtatggatgagcaagagctaaagaacacattattgagtttggggatggataatgtcgatgccactctattgatcaagatagcaaaaaataaaaaaaccagtgtaagtcgagttttcattatgagcctgctaggtttatatatggggactgcaactcttattgccatatattttttatttacatataaaatggagaagaacgaggtgttgatattttcagtatcttacataccagttgtgttaataatttatttcttcactccatctttaaaaaaattattttggagtttgaaagttttagttgcgttaaagtggaattaacatgagtggttttgcgattaatactcaagaaagaaaaagaggatacaactcgtatttttcataggtctgtagctcatgcatattattgacataccccccagaagtggttttattaatagtgaaacggagttagttactgattatataaatgaatttaaattaggacacttatcacttggtgaggctacgtctaagcagcatgaacagtacaaaatattggaagaaagatatttttatttaatagcgaacaatgcaaagttacttgctgtaataaaaagaaaaagataaaaactcagttagcaatattgtcttggcgcaggttggtttcgttagtggcgagttacaagtaataggtggacatggtctctgtgcagcaagtatgggtgccgtgtgtgcttcatttggggcacctctaatggttcatgaagcagaaaatccatggggaaatacacattatttagtcgtgtgggaagaggttattattacatcattagaaaacgcgtatatctatgcggtagaaaaatcaggttagacaaaaatagcggaaaattgccactctatcggagatagagttctttctatgggggctggattcagacatgtactcaagccagatgcgtggaaattatttaggtatattaagaatgattctattataggataggaatactatggttgctcctgttagcccacaaaaatattgcaattcctccgtatctacggacatattctatcccgacgtcaatcgaaatattttttagacaataactcatttcctttttaggttgaactccatttttaccatcgagataatgtgctaatactcttgtttatttaaaataatacaagctatttggtgtctttatcgcaaggtaaaaacctaaaaataggtcaattaaaatagcaaaaacaacaaaactaccggtaggctcattggccaggttaaaccaataagaagcgcagtaaaaatccggattttccatgagggatcaacgctggtcaccagggtgataaccgtggagagggccattccaacccagtagatcatttttaaagcgatccatgcagatgacattgtaattccaaagccttgttaacgtacggtgacacagcaaataattaacaaagattttacgcccaccgattttagatcgccagccttaatcaggacgaaaacgtacattcgtatttttttctgttcaaaatatgcacaatacagatttccatttctgcacgcgtcgaaaagtccgttgggagtcagtctaagttttgtgataggaattattgcaatgatcggaacagcgtctaaggtgaataggttatgtaagccgtattcccgatgacttctgaccatggataatcctgtgattacactttattctgacgctgatttttttagtccgtatgtaatgtccgtttttgttgccttaaccgaaaaacaacttccttttgagctgaaaaaaatcaatctttcggataatgaaaatatgcagcagagttacgcccaactctctttcactcgccgtgtaccaactttgattattgatgacttccgaatttcagaatcgtcggctattactgaatatttggatgaagcttttcctgcccctgcttatcaatccctatacccgaacatgatgcagcaaagagctaaaaccagagagattcaggcgtggttacgcagtgatttattatccatacgattagaaaggcccacagaagtgctgtttggtgggatgaagtgcccgccgttatcgactattgccagtaacgcggcggataaactattcgcagccgccaattggctactggctgatggacaggataatttgaacggagaatggtctattgccgatactgatttagctttgatgcttaatcgtttagtgatgaatggggatgatgtaccggctaatttacagcgttatgtgtcctatcaatggcaacgcccttcagttcagcagtggttaacgctgtccaaataagccactacctattcgtgagatcactacctattcgtgaaatagtgaaggatgtatttcgtggctgtcagctgcaattatctgatgacgaatattgaaactgtagcagcctgcatttagatctaaggctgtatttccctgttaattattcaggatacctgaaccctgtaggttgggttgccgtcttgggtaacttggtaggcagtgacatgcagacattctttaatgatcacactgttgttttttaatccggttcgagagataaacgcctcacctccaataccggataagatcagtctagccgacgggccgaaaaggttgatttttgctcgatcattttttgtctgcgtcagacaagttactttatttttgttcattttaacttcgatcaatgaaagggtgtcgtccgaatttactaaaaagaagtcgggcactatccgctgaccctctgggttttcaaaacgaacctctcgtccccagcttataatatgttcgttgcgacataagaataatgctatttctatttgtaaccagttttcccaaccggtgatatccatatcgctaattagtcgtagtttgtgtttaaaatcgggatgatcaaagaaagtcttaagggctagtgcgtaactcattgaagctccatggcgaatcggttaattattaagtcagaaaaagggccgggaagcgtagtgtaaatcgaatttatctggcgttatgcgataattaacgcactgtttatcggtatttttatctcttacaatcggtgatttgctctttgagagtgtatctgcaattttatggcgatgagaatcaaggctgaaaagtgagagaacaggtcgctagagcggcttggaagtactgcgagagaattctgaacaattagcgctgccggagattgtatcttttaccgcgttaattaatttacgttctcaaaccgtgatggaacgtttagggttggagcggcagaaacccgattttgatcaccccggcgttgctgtaggttatccattacgtaaacattgttggtatcgtgtgacgtgagaacagtggataacacgctaaacgacttttctgtcatggtgaaaaaagtagtatattgatagataaagcaggctagcgtgtcaggcggaaattaaaatgttcaatcgcattaaaacggcacgttttgttagcgtaatcttagcgatcgttttcctgggcgcctgtagccaattaccacgtaaccctttgccggtcgaattaatggacgaagctgaaattcccggtatgccaaatattcgcgcggctgctggtcatatcagcccgatcttcgaagcagatttattgcaatcttataaagatgaacgaccggatcaattcctccgtcctgacggtcagcgagtctatccgcatttagcgctatccggcggtgggcctaacggcgcatttggcgcaggttttttaaatggctggagtaagaccggtaagcggccagtgtttaaagtggtaactggcgtatcgactggcgcgttaattgcgccttttgcatttttaggcagcgatcacgatcaggcgttacacgatttttataccacgacgacgacgcgagatatatttcatctcgataacttattattccgtcttttcttccgtgaggccctagcggataccagcccactgtcacagctaattgatggccatattactgcgcaattattgcgtgaaatagcggtggaatatcgtcatggtcgtcgtttgtatatcggaacggtggatctcgattctcaacgcttttttgtctggaatatgggctgctcgccacaaaaggcacgccggaatcattaatactatttcgcaagataatgctggcatcgtcctccgtgccggtggcgtttgctccggtctttttcgacgtggtggccaagggtaaacattatgacgaaatgcatgttgatggcggcgtcggagccagagtgttttataacggcggcgtattcagcggcaaaattgtgcgcgccagagccggtattacgaatagcaaagaagatatttatataatccacaacggccagctcgggccacgtcctgaacctacgcctcgattggttcggaatattgccatgcgtactttggattcttcgagtaaagctacggtggtcggggatttataccgtatttatgcgttctccctagccgagggagccgattttcattggatcactattccatcaaatcttgatatcaatggagccgaaatctttgatccagtgaagatggagaaactttatcaggcaggctacgccgaggcgctgcgtggccctgtatggtcattgcgaccgccgggaacgatcgaaatggatgtgctgctcagcgaggccgcggcacagcaggctagcgagacaaaatgacttcactgaccgactgtggctggataacggctgaacgggcagatttattgttgctgaaaggggttgttaatgtaccagaatttcaacggtgaactgacttgggctgaacgccatatgacacgtacgctggccgcagtggcggcattaccggatctcagccaggtgcgtctggcctgtaacatgcacctggatttgaaaatggcaccgctggtggccggtttattgagaaagggggcgcgggtttatctgacaacctgtaacccgacgacggtacaaaatgatgtggtggaatatctggtatctcaaggcgcagaagctcacgcctggcgagacatgagcgctgaagaatggtccgcttcgttcgatcgggcgctggcatggcaaccgacacacttatgcgaaatgggcgctgatttaacaactcggctgcatcagtctcctgatgggcctaaaattaaagccggcctggaagccacgggctctggtattagccgtttacaaggtctggctccgcgttatccgatttataactgggatgatttgccggtgaaagaggggctgcataaccgccatatggtggggctgacggcttggcatacattcttccaaactacgcatctaaccttgcatgagaaaaaagttgtggtgatcggctatggtctggttgggcagggcgtggcggcatcggctaaagcgtatggtggtcaagtatctgtggcagaaatagatcctgccagagccttacaggcgcgttatgacggctggcaggttgttgatttggctgacgctgtcaaagaagcggacgtgattgctaccgcgaccggtgcgaaaaatgtactttccggcgctcgtctggctgatgccaaagatggggtgtttattctcaacgtgggtcacgttgcagaagagattgataccgctttcttaaaacagtacccgagcagtgagccgatgcagcacgttttcgcctattcggttggagagaaaactgtgtatctgctggccgatggttccatgtttaatttgaccgcgggttatggcgatagcctgaatgcttttgatgtcacactggctgtgatggccgcggggattgggcatattgttggtgcaggggagtctgcggaggcggcggtgtatttattaccgcagtcagcttggaagtcggtgctctaacgcaccttgctgatatcaacgggggtcgatggatttcggtcggccgccggatttattgcaaaaagaaacggttgagttatcgattgccgctgccgccacatagacgatgaacagcaggtataaaaagagattattggtcatgttgcacctccattatcctgaacggataacgtctctgaatactgactgtgacatcatatgagcgataagtgaacaaaaaatgaacagtcagtgaaagattaatgacagtgaggcgagtattagcaatatttctaatgaagaaattgctttgatggagaattgtttagattgaattggactatttatcagacacttggtgtaatttaaaaacaatttaaccagcatgtgatcaagagggcagtgattgtgctacactatgcggccgataatcaaggataaatcatgaaaaaagtctcaattattgctcagtgcttagtaaatgctaagagtttcagtgagatgtcagaagctgaatcctcgatcaaaaaagtattcaatgatagctatagcgatcactcatttgacgaatggaataccgaagtttccgcgttgagtgccaagcgagttatcagcctggttgctgggtcatccaaggttcgcgtcagaggtttaattcaggaactgtggaatcactgatcctgctctgatacttaactcctctctgatttttcactgcgtagagcatgcctgtcatgccacgtggtgaaaagtagaccttcctgttgcagcggtaactcaccgccgttctctcttctcgggctggcacgatctctaaactgctttataaagcacaaattttaaccaatgacggcgttggcacagtttctttggcgcggttcacgtaacttcatgacatagacaaccacgaggtaagattatgtcattgatcgatagcttcagaagactgatcagcaaggctcaaactaaagtcacttgccctgaatgcggtaaggcatctcagcaggatacagaaaaagtgcagaaaaataaggcgttggtttgtctaaagtgcggcagcctatttttgcccagcgatcaaaaacgttaaccaaataccatcgctgcccagcgtaatagcagcagagccaggcaaatgcataacagtaccaggaacattttccagtgctttttatgtaatcttttggttaccatcattttcctcttatctatctggttcatttacgtcagtatagtaacgaaaaactatgctgatgagcagatatactctgtgcgcattgcttgagataaagtgtaatatgcgttgtatcaataatgtaagaaatagaattcgaaataaggaaaatcatggccactagccttcctcaaaaatatgaaaatgctgagcgttgggcatttggtgatactgaaagcgtcgcagatgagctattggcgctggtattgcaaggcgtaaaaacggccacttgtgcctctttagatggagatggcgtaccgcaggtgggcgatgtatttgtggtagtgaatggaaaaaatgtgccggcctgtgccgttgaactgacggaagtggatctcaaaacctacgatcaggtcgatgaagcacatgcttttgccgaaggtgaaggggatcgtactctggcctattggcgtaaagaacatcagcgcttctttgaggcttatgatatgttctcacctgatatgacattgatctgcatgaaatttaaagtgattgagacgttttgattttagtctgaaaacacgacttgttcggcaggaatgaataatctaacgattcgatacgaatactgcccgataagggttaaaaatattgagggaaaacccgccgtctgtcacctcgtgttattcgacggacgggttttcttgctaaccaactatgtcatcctcattacccaggcatcctgatgccgatcataatgtttcttatacaacaacgtttgtttcccatccaagagcgccggaacgctggtgtggtcatcccaaccgtctaattgcgtgcaaagatctggatctgatttgcagggaatactaagcgtattttcccctttggtctgctgaggggatatttgcgcatcatcaatctcaaaactgcctatttttaatactgactttctcattgaaactcctggagattatggtggtaggaggtgtgaccagataaggccgcattattgagaatagccgaggttattaaaagcgccaaatgcagacgtagaaaaatacgggtttttattcggccagtttctggatgttatattggttacgcccattatttttcgagaaatacagtgccttatccgccgctaacagcagatgagattgatcgatgtcgggtgagtgcactaatggatgataaaaactggcaccaatgctgattgtcactttctggaattcgctgtccgcatgtttaatacccatgatacgaatggattccaaaatatgtttagcgaccaacgctgcgccagcttcgtcggtatcggggagaattgcggaaaactcttctcctccatagcgagcgacaatatccgtactgcgttttagtgattttcttaaggcgcgggcaaccaatctcaggcaggcatcaccagaaacgtggccgtagtggtcattaaagtttttgaaataatcaatatcgatcatcaataatgccagtggcgtatctgtacgcttggcacgtagaaattcgtgagataaaaccttcttgaattcccgtctattcggtaatttggttaatgagtcagtgcgtgcctgaatctccagacgtcgattggctttaaccagctttagctccagcagcttacgctcatgaacatcttccgccgtgccataccagcaaataacgttaccgtcagtatccaggcttggcgtggcgcgaattcgcatccagttccagcccttttcaacgtggcaaaaacggatttcaatatcgagagattcgccggtgcgcagcgaatgctcccaactgaccagcgcgatatgccgatcctctgtatgaatggttctaacccattcatcttccaaggcctgtttgcgagtaaaaccggttattttttcaaatcggctgctgatatcggtaattcggccgtcgggtgccgcggtccagggaatttgtgggttcagctccaccatattacggtaatgttctttgctactgcgcagcgcggcttccatttgtttcaggcaactgatatctatcatggcgacggataatccggttacccggccttgggtatctcgagccgctttcatgcgaataaaaaaaatgtgtttctcgccgggcatctgaaattcagcgtccagaatattttcgttattataagcccgcagtagagcctgacgtagaataggaacaatgctcggcatgatctcaaccacttttcgaccgttaatttcattggcgtgtttacctaataaattcgccaaataatcgttaatggtgacgtagctcagagtggtatcaacaaaacataatccggcgggagcgttggaatagatagattctaattcaaataagcgctgtggggcgttgataggaaaatttgtcaagtcgcgatctatacctctataacctttgaattcgccgtgctcatcaaataacggaactccgctggtttcgagtaagatttcagaaccatcaatgcggagattacgattttttaaaccagaaaaagggcgacgctcggcgctgattttgctgaaaacatccatgaatcgctgtgcttcatccttgggcataaaatcatataatgatttaccgataatttcatggggcgctcggccaaagaactctaggcatttagaggatgaaaaggtgtagtgggcattagcgtcaatttcccaaatccagtctgagttattctcgataatatcgcgcaacttatttatttgttggcgtagagtcgtcgtcaaagactcatttttattttcatcatctggcatgatgtcactcctgtttgagcacgacttccttgagtaagaaaaactgtcaccatattctggcttgctgattgtatatcagccataaaatgaatacagcttattaggagtaatctgagcggctggtgttgaattaatccactattttataatgacaaaacattaaccaaagtagaaacataagtaaattttcagaataatgttttgtcagctttaaatttatcagcacactcggtagggaaactaaatatttaggcgttaatgggttaattcattattacagaataggctaaatctgtattaattactgcgaactcatctctgcgtttggacctcggtggttcattgatttttattcattttttatgatgccaggtaaaacaccagactgtccatgctacgaataataggtgacgttatcattttttgttatatacaaagttaattcttttgatgtgttatcggaaatattgagcggttttaggctaaagctattcatctaatttaagtgttcgtcaggttttaatatgaataattggtaatggattcttctataaaaaacgagtttgaccgaatgtctatgctgacagggttaggattttatgccaaaaagagattgattgttgcagcgttcagacaagaaaataatactcggtcaatatgcagagaaatatggctagaccataattagaatgcgtaatgacaccctagggctttcatataatcatcaaggagtctgactcgaatcttgtttacctcaggtttcctcttcttcttttttagcatatcggattctttaaaaaaacgccggatggccataaacgacctatccggcgagcttatttagagaggctagaagcgaggaatcgctgtaccccaattgcgccaatctttaggttcttcagtattcagcaagaaatgctgattgaccgaagccttcggtgccaatggcgttgtcggtggcgttgcaaaggcgataccgccgcgaataaattgctggaaggtgccgcttttcactacgccgccggttagaccaaactgtaggttatagccggaagccagccagaacacactgttttgccgaacgagctgttggtatttcttactgattcgcagcgaaacctgtactcgatctgacatcgcgccaagattgaatccggtgaccgtaccgacctccattccgcggaacaagaccggcgtgccgatctgtaatgaaccggcttcggcagtatccagcacgatgctcagaccgtctagatagcgcgaatcagtaatggtagcggtttgtagttcgaaattacgcaatgcctgcccacgccccggttccacgttaatatacggctggagtagggtgtccaggttattgacgccggcggcggaaatttccggtgaaacgatagagaagcgggtgccgaagcgagcaaagctctccacgtattctggataaagtaccgctttggccagaacttcgttgcgctcggcggacaatttcagcgattcgacctgaccaatatcgattcccagataacgaataggcatacctgccgccagtttgctggcatcgtaagtgcgtagcgtaatttggctccccacggcgcgggcggcggtttctgtggcatacagggtgcgtttaacgcctttgcccaaggttacgccgtcgagattatcgaagctaatggcgcctttgagtgcccggttcaaaggcgaagcttgcacggtgagtccgctgccgtttaactgtacttttgctccgccctcagcccagaagatacttttactgctcaacaggttacggtattccggctgaatataaacatccacctcaaactcattggcttttgggcgaacattgactatttcgccgacctgaaacttgcggtacagaactaccgagccagtttgcacgtcgggcaagctgctggccgttagagtgagggtcgtcgcaggcaggttacccagaataccgtcttcagccttttcgcgactgctgtagagcggatattggcttttcggttcacctttacccccggccagcagctgaataccgccgtcaaaccattcttgtgcgctggcaccctgaacattgatgccatcaataccgattttgacgtcgatacggctgttaaccacgaacttgctatcgttatgcaccaaatgacgatatttggcctcaatggcagcggtaaaggtgataccggaatcatccagcgtgcgggtaataacctgcccgattttaatgccgtgcagcacaataggttgcccgacatcaataccgtagctttgcggcgcggtgagggttaacttcagtacatccggctgctgtaacaggcttttgttgctatctagtacgataaagtgctgttgcggctctccgtctccgggaaccagctctagcgtattaccggtcaataattcactcagcttggtatcattgaggctgatacgtggactgttcatttcgatacggctgccggtacgcataagatcgacaaccgaaggatcgatggtcagttcgccggtgaccttactgtctggttgcaataccagtttggtcaatgtaccaacctgtaatccctgataaatcagcggggtacggccttcagccagattattgccattgggtaaatccaaggttatggctacgccgcggttactgtgggccaaatcggggtacaactggaactgttgatcggttttggcatcctggctttgctgcggtgaatcaaaggcaattgcgccgttaaccaaggccgccagactctccatctggactgacgcgccgctcaggctaaaatcgcctttaaaacctgagacattccagaatcggctgtcatttttcaccagatgagcgaagcggcgatcaatcagcacgtcaatgattacaccattgttatccggcgcaatgttgtaatcataaactttgcctaccggaattttgcggtagtacaccagagaaccggtattgagagagccgagatctttggcgttcaaatgaatcatcagctcgccggtattcaggcggaatttgggttgagtatctaacgcggtgaaatgggtttgcggtttaccgtggcccggcatcataccgatatagttaccaccgaccagtgcgtctaacccggaaaccccggccagagaggctttgggggtaaccagccagaattgggtcccttctcgcaacgagtcttccaaatcgtttttaatactggcagtcacgacaatgctgcgtaagtctttgctcagactgatggattgcaccgtgccgacttcaaccccttgatatcgaataggggtacgaccggcgacaataccggcggcagattgaaaatcgattgtgacttcagctccgcgatcttgccagttggtataaaccagccagcccgcaatcagcagagcaatgaaaggcagcagccagaagggtgaaattcggcgtttgtgcctaacctgagcctcagtcggcgtattcggcgtttcctgttgcatgtgcatcccaaatcaatcggctatccagccattcaacggcaagaatagtcaaaattaccgcagacccaaagtaaaaggcagccggtcccatagtgaacgaaagtagctgatctctgttgatcagcgacatcattaacgcaataacgaacaaatccagcattgaccagcggccaatccaggtaatgacacgcatcaaacgcatacgggtcttcaaactgtgctgagttttcaaatgaatactcagcagcaaggtaatcagtacgataactttagtaaaaggaactaatacgctggcaataaataccacggcggcgatcggcatattgccggaggaggccagagaaatcacgccagagaaaatggtatcttccatacgcacgccgttggcgtaaacaatcgagattggcagcaggttggcgggcaatagcagcaccatagaggcaatcaacgcagcccaggttttttgcaggctgtggcggcggcgatggcgcagcggcgtgtggcagcgcggacagcgacccttggcgtcaggatggccggtatagtggcaggagaggcaaacccgcagcgtttcccttggccccggcggctgttcctgcgggtaaaagcgttcccacagttgctccagattcaggtgaattagcgtcagaatacttaataaggttagcgccagataggccgtaagcccaagccctggggaaatgtcggcatattctttgactttgatacaggcaacagccataccgatcagatagatgtccagcatcacccattcttttaatctctccagcatcagtaacaccggccgcaaattcatgccgatacggctaccaatgcgcagataaaggagagaaagcgtcagtgtgagcggcgcgccaaaaatacagaaagccaccatgctggcggttaaggggtcgccttgtttggtcatctgccagatgccttccaacagactggcatcgatatgggtgccgagcagacgaatgctgattaagggttcgctaaaggcaaagggcatcaacagtagcattgctacggccattgcggttaggcgagtcagggaccaatcacggccgctgacgaccttggcgcaacagcatgggcaataggcggcctgattaccttgcattggtggcagggtaaatagggcgtcacattcgcagcagcgctgttctcgcgcggtggaaagagggcggtaaatcgcttctatcttcataaatatctaatcgatggctccgccggtgatgaaaagcccaatagcaatatgggtaaatgccgaaccagggtacagaaagtcgaggtatataatttggagcacattaaattcgcagcgcatcaaattacgctataaatcaaatatagtgtgcgacggggctgagccgcggtttttattctcgaacgtgacagcataacccgttgtgtgaaccctgaaaatcagtcaattccctattgtagggaactcttttactcagttaaagatgattagccttgtggcaatgtacatttaatgcttactttagagaggctaagcaccggttgcctctggctattcttaggtttgttaatggttacgacatgaaaaaagaagaattctacgcggaattaaaacgcgatatgagagcattaattgctggtgagcataattttatcgctacactttccaatgtcagcgcgctgttgtatgagcgcctcgacgggttgaactgggccggtttctacctgatggatggcaatcaactggtattgggaccgttccaagggaaaatcgcctgtgtacgtattcccgtgggtaaaggcgtgtgcggtacggcagtgtcagaaaatcgcgtacagcgggttgcggatgtccacgctttccccgggcatattgcctgtgacgccgccagtaatgccgaaattgtcctgccaatcgcgataaacggcgttgtcatcggggttttggatattgacagcacagtttatgatcgtttcgatgaagaagacgaaaaagggctgacgtcagtcttggcggggctttgcgcccatcttgaacactgtgacgttgcgaaatatgtcacacagactgcaagttgatacacggataacgtggcaattgctggaggcgtcattataatgacgcctgttcatgcctgcgctggttggcaaacccgttgtaatcaggaaatttcatggaaaatcaacctaagttgaacagtagcaaagaagtcatagcctttttggccgagcgattcccgctttgtttcaccgccgaaggcgaagcacgcccattaaagatcggcatttttcaggatctggtggagcgagttcagggggaagagaatttaagcaaaacgcaattgcgttcagccttgcgtctatacacctcaagctggcgttatctttatggggtcaaagtcggagcagagcgtgttgatctggatggcaacccttgcggtgtgctggaagagcaacatgtcgaacatgcccgcaaacagctggaagaggcgaaagcccgtgttcaggcacaacgtgctgagcaacaagctaaaaaacgcgaagctgccattgctgcgggtgaaaccccagagccacgtcgcccacgtccggcaggtaaaaaacctgcaccacgtcgtgaagcaggcgctgctccggaagctcgtaagcctcgtcagccaaatcgcccacagcaggcccgtgctcctcgcccagcggcagaagagaaccagccacgccctgtgccggtcacagatatctcgaaactgcaaattggtcaagaaatcaaagtcagagcaggcaagagtgcgatggacgcaaccgtattagaaatcgctaaagatggcgtacgggtgcagctatcttcaggtctggcgatgatcgtgcgcgcagaacacttgcagttctgatacggaggccaacctaggcatgaacaaatttgtcagattaacagcattagcaggcttgttactggcgggggcgagttacgctggcgatacgactacttatcgtatcgatcagttacctcaactgcgtcaagagcctcagcactcgacggtgagtgagcgcgtcgcttcgcgcttcactcgctctcattatcgtcagttcgcgctggacgatcagttttccgccaagatatttgatcgctatctcaatatgttggactacagtcacaacctgttgctggcatcagatgtggcacagttcgccaataaaaagaattcactggatgatgaattaaaatccggtcagttggatacgccttatgcgctattcaacctggcgcagaaacgtcgtttcgagcgctatcaatacgcattgtcagtgttggaaagaccaatggactttaccggcaatgacaccatcgatttggatcgcgccaaggcgccgtggcccactagcgaagccgagctaaataagctgtgggacgccaaggtcaaatatgatcaacttaatctcaaattagccggtaaaacggataaagagatcaaagaaacgttgaccaaacgctaccagtcagccattaaacgcctgacgcagagcaacagcgaagacgttttccagctgatcatgaatgcttttgctcatgaaatcgatccgcataccaattatttgtctccgcgtaacaccgagcaattcaatactgagatgagtttgtctctggaaggcattggcgcggtattgcaaatggatgatgattacaccctgattaactccatggtgcccggtggcccagcggccaagagtaaggcgattaccgtcggcgatcgtgtggttggcgtcggtcagaccggtaaacctatggtcgatgtgattggctggcgtctggatgatgtggttgcgctgattaaagggccgaaaggctccaaagtgcgtttggaaatcctgcctgcgggcaaaggaaccaaagtgaaaaccgtcaccctgacccgcgaacgcatccgactggaagaccgagcggttaaaatgtcggttaaaaccattggcaaagagaaagtgggagtgttggatattcctggtttctatgtcggtttaaccgaagacgtgaaggttcagctgcaaaaactggccaagcagaatgtgagcagtattattatcgatctgcgcagcaacggcggtggcgctttgaccgaagcggtctctttgtctggcttattcatcccaagcggcccggtcgtgcaggtgcgggataataacggcaaagtgcgtgaagacagcgatgccgacggcattgtgtattacaaaggcccgttagtcgtgctggtggatcgttatagcgcctcggcgtctgaaatctttgcggcagctatgcaggattatggtcgtgcgctgattgtcggtgaaccgactttcggtaaaggtacggtgcagcaatatcgttctctgaatcggatttacgatcaaatgctgcgtccagagtggcctgcattaggttcggtacagtacaccattcagaaattctatcgcgtggacggtggcagtacccagcgtaaaggcgtggtgccagacattgtgatgccaaccggtgtcgatccggcggaaaccggtgaaagctttgaagataacgcgttgccgtgggatcgcatcaacgccgcaacctacaccaaggttgatgatttgaaacctttcgagccagcgttattgaaagatcatgcggcccgtatcgctgtcgatcctgaatttaagagcattcaggaagatatcgtgcgctttaaggcgttaaaagcgaaacgcaacaatgtttcccttaactatgcgcagcgtgagaaagagaatcaggaagacgacgccacccgtttggcgcgcttgaatgaacgtttcaaacgcgaaggtaaaaagccgctgaagtctttggatgatttacctaaagattatcaagagccggacccttatctggatgaaagcgtccatattgctttggatctcgcccagttggaaaaagcgcagcaaccagccgctaaataagccgccagtgatgcaaaaatcatccggggtctcttatgaggccccggatttttttatggtacgagtgggccgtgatcgtaaaaaacgcgctaaaggatcgccggagtggctggggcggcggagggaatcacggggaaaacggcgcaggaagacgactgaatgtgataaaatatgttcaaatttgtaaagttatgttgatttaatcagttacggcttaacaagccttgaaaatttattagatgcccataggatcaggatatctcaataggaatttcggtaaacggctaaacaaataaggaagtaaaaatttatgatgcgtatagctctgttccttctcactaacctggcggtgatgttggtcttcgggctggtgctaagcctgactggaattcagtcaagtagtatacaggggctgatgattatggcgcttctgttcggttttggtggttcattcgtttcactgctgctgtctaaatggatggcgctgcgttccgttggtggggaagtgatcgaacagccacgtaatgaaaccgaacgctggttgctggataccgtacgtcgtcagtctcaacaggttggcatcgctatgccacaggttgccatttatcaggctccggatattaacgcctttgcgaccggcgctcgccgtgatgcttcgctggtggcagtgagtaccggtttactgcaaaacatgagccgcgatgaagcggaagcagttatcgcccatgaaatcagtcacgtagctaatggtgacatggtcacaatgacgctggttcagggcgtggtgaacacctttgttatctttatttctcgtttaattgcgcaggttgtcgctggttttgtgtctggcgatcgggaaaacgaaggcagttcttctggcaacccaatggtgtatttcgccgtgtctatggtgctggaactggtattcggtattttggcgagcattatcaccatgtggttctctcgtcaccgggagttccatgcggacgctggctcagccaaattggtgggtcgtgagaagatgattgcggcgttgcaacgcctgaaaaccagctatgagccgcaggaagaaagcagcatgatggcgttttgcatcaacggtaaatctaagactttcagcgaattgctgatgtctcacccaccgttggacaagcgcattgaagcactgcgtactggcgaatacctgaaataagccacaaccgcttgtggtgaagcagttagaaagccccgtgaatagcggggcttttttgtgcctttttattgtcgaattttcagcgcgctagctggttttagatgaaatgcgcagcaggctaaccaccgccgccagcgtggcaaaaccgccggcaagtagcaaagaagcataagtagcattgtccgcaaactgatggaacattaaggccactaacgccgcgccagaggtctgccctagcagacgcgaggtgcctaacataccgctggcaccgccgctgcggttgggcggcgcggcagaaatgatcgtgtgattgttcggcgactggaataaaccgaagccgacgccgcagagcatcatgcgccagataatattcaaatcgctcggattggccggaagagttgctagcaggaagagtccgctggcgaaaactgccagtccgatgccgcccaacagacccgcctgatagcgttccactaaccgaccggcaatcggtgcggccacaaccgttgccagcggccatggggtgagcaacagcccggtcgccacttcatcccgccctaacacgttttgcaggaagaacggcagcgacaccatcgccagcatttgtgcaataaaagaacaaatcgaggtgccgacggagagggcaaaaatcgggatacgtagcagatcgacgggtaataacgggaaaggttgcttgagctggcgacgcacgaagaaaaaaccaatcagtaatagcgctatgatttcaccggcaattagcgtcgggctttgtccttgggcaaagccgctaatggcgataatcagcaggccaaaggttatggcattcatcagacaactgacaatatcgaatttattaccgttactcttggctacgttagcgggtaagtatttcatgcccaaacaccaggcgagcaggccaattggaacattgatggcaaaaagccattgccaggatgctatcgatagtacggcggcggcgatggtagggccagcggcggcagaaaaggccacgatcagggaattaatgccaataccgcgtccaagttgggctcgcggataaatgattcgaattagcgccgtattgacgctcatcagcgctgcagccccaaacccctgtaatacccgtgcaaaagtcaacgtccaaagggaatcggacagggcgcagaataatgatgtcaggctgaaaataagcaatccagcctgataaacccgccggtagccgatgatatccccgagggatgccagtgagagcagcgaaatggtgatggctaactgataggcattgacgatccaaatagaatcggccgggctggcattcaaatcgcgggcgatggtgggtaacgctacatttgcaatagtgccatccagtaccgcaatagtaatacccaaagctatcaccaaaatggcggcgtagcgctggggaaccggcaacccatcagtctgagaaggtgtcatatggaattttatctgtaaaagtaatgaaatggctaagtattataatgctaacggcaaaggtggcagattgcatctttgccactcggataattgtcatagctaattgtcataactgattgtcaacgaatgtgtgcaggatgcaggagtggccaaatcatcatgataagacagataaaagccagaaaatatcaatgctattggctaaaacgaaactgcgatcacggaaaaatgaaacatcgttcctataatggattgtcacatgttaaccagctgatgctgccaacatttttcattctctgacgttttaaggattcctcggatggccaaaggtaaactcattccactgacatttcacacctatcaggatgcctctaccggtgcccaaattactcgtttaacgcctcaggacgtgacctgtcatcgtaactatttctatcaaaagtgcttcactcaggatggccgtaaactgttatttggcggcgcttttgaaggggcgtggaactattatctgctggatttgactactcggatagccactcaattaaccgagggaatcggcgataatacttttggcggttttctgtcgccaaacgatgacgcgctatattacgtaaaaaatggccgtaatctcatgcgggtagatttggattcactggaagaattcttggtttatcaggtgcctgacgggtggatggggtatggcacttgggtagcgaattcagattgtactaagttggttggtattgaaatcaagcaggaggactggcagccgttaaccgattggaagaaattccacgatttctatttcactcatccttgctgccgtttaatgaaagtcgatctgcgcaccgggcaatcaacggtgattcttcaggaaaaccaatggctaggccatcctatttatcgtcctttcgatgatgctaccgtcgctttctgtcatgaaggcccgcacgatttggtggatgcacgtatgtggctgatcaatgaagacggcacgaatatgcgcaaagtgaaaacccatgcgccgggagagagttgcacccatgaattctgggtgccggacggctcggctttggtttatgtttcttatatgaagggtagcccagaccgttttatttgcagcgccgatccgctcacgttggaaaatcgccagttgaccaaaatgccagcctgttcccatttaatgagcaattatgacggttctttgatggtgggcgacggctctgatgcgccggtagatgtgcaggacgatagcggctacaagattgaaaacgatcctttcctgtacgtattcaacatgaaaaccggcaaacagcatcagatagcgcgccacgacacctcatggaaggtatttgaaggcgaacgtcaggtaacccacccgcatccttcttttacaccagataataaacaagtgctgtttacttcagacgttgacggcaagcccgcactgtatttagcgactttgcctgaaactgtgtggttatagcatctttgctctggcctccggggtaaaaagaggccaaatccctatttctcagtgtgatatcagattaattatattgcatcattgcgcaatctcaccgcttcctcttataataaaaccattgttctattttttttaaaacaaaaaaacgagtagggtaacgacacaatggctacgaatgattttgataaacagcccgactcagtttcgtcggttctgaaagttttcggtatcttacaagcgttgggtgaagagcgagaaatcggtattaccgaactctcgcagcgtgtgatgatgtccaaaagtacggtttaccggtttctgcaaactctaaagtctttaggctatgtggcgcaggaaggggaatctgaaaagtattcgctgacgcttaagctgtttgaattaggcgcaaaagcgctgcaaaacgtcgatttgatccgcagctcggatattcagatgcgcgaattgtcgaatctgacccgtgagaccattcacctgggcgctttggatgaagacagcattgtctatatccataaaattgattcgatgtataacctgcgaatgtattcccgaattggccgtcgtaacccgctgcacagtaccgctattggtaaggtgctgctggcctggcgcgatcgcggcgaagtggaagaaattctgtctcatatcgagtttacccgtagtaccaaacacacgctggacagcgctgcggtgctattgccagtgctggatcaggtgcgtgaacaaggttttggcgaagatatcgaagaacaggaagaagggctgcgttgtatcgccgttccggttttcgaccgttttggcgttgccatcgcggggctgagtatttcattcccgacgctgcgtttctcagaggaacataagagcgattatgtaaagtcattgcatcaggcggcgcgtaatatctcggaacaaatgggttatcgcgactacccgttttaatgggcggcgtttaatgcattattagctaggtaaatccagcggctcctgattcaggggccgttttttttgctggtttcccccatgatggtaaattcttaaggtgcaaatgatacttatgcagaatgtatcgtttacataccatttagtttacatcagttactgtgaatcgagtttatcaaacgacagggagtgtgaatgatgaaaaaattattgccggcggcgctgttgctgcttttggctgggtgtagcagtagcccgcataaattgatcgatcgcggtgattatcaggtagataccacccatcctgcggtggggcagaacgatcgggtgcgctttctagtgttccactatacggcggttgacgatgcggaatccctgcgattgctgactcaagagcaggttagcgcgcattatttggtgacggaacatccgcgtaaagaaggtggcaaaccggtggtactgcaactggttcccgaagataaacgcgcctggcatgctggggtcagcgaatggcaaggacgtaccagcctgaatgatacctcgataggcgtggaaatcgtcaatctgggctatacagaggagctgctagggcgtaagtggtatccgtttaacgaaaaccagattgaattgattgagcggctggggaaggacattgttgcccgttatcatattgctccgacagatgttgtagcgcatagtgatattgctccgcagagaaagtccgatcccggcccgtatttcccgtggaaacgtttatatgaagctggcattggcgcttggccagacgaagggcgggttcaggaactgattgatggccgtgataaacacgagctggtgccggttgagtctattcagaaagcgttagcgacttacgggtataaaatcccgctaaccggtgaactggatgaggaaaccctgaaggtgatagctgccttccagatgcacttccgcgccagcgatttcagcggcgtaccggatgtggaaaccctggctatcgcacaggctctggtggaaaagtaccgtagttaatccagtttgaagaacccaggtgaaacaaaattgaaaaagccggacagtttacgctgcccggctttttactgattacgataagtgagacatttagcgatgcgctaattccacctcgtcatcactgtttagaatctctttgtcggtttgtttcatcaattggctggtgatggtaccggcagtcatagaaccgcttacgttcaaggcggtacggcccatatcaatcaaaggttcaacggagattaacagagcaaccagcgtgaccggcagacccatggctggcagtacaatcaaggctgcaaaggttgcgccgccacctacaccggctacgccagctgaactgacggtgaccataccgaccaatgttgcaatccaaatcgggtccagtgggttgatacctacggttggagccaccatcaccgccagcatagccggatacaaaccggcacagccgttttgaccaatcgttgcgccgaaggacgcagaaaagctggcaatggattcagggatacccagacggcgagtttgcgcttccacactcagtgggatgctggcagcactggaacggctcgtgaaggcaaatgtcagcaccggccaaactttcttgaaaaatttcagcgggttgataccggtaaaggcaatcaacagaccgtgaaccacgaacatgatcgccagacccagatacgaggccacaacgaagctacccagtttgataatgtcctgaacgttagagccagcgacgaccttggtcatcaatgccagcacgccgtatggggtcagtttcataaccagacgaaccagtttcatcacccaggattgcagggtatcgatagcaaccagtacgcgtttacctttttcaacgtcgtctttcagcaattgcagtgaagcaattcccagcagagtcgcaaagataactacgctgataatcgaagttgggtttgcaccggttaaatcggcaaacggatttttcgggataaaggacaaaatcagctgaggcacgctcagatccgaaaccttgctcagataattgctttcaatcgcgcttaggcgagccgcttcctgagtgccctgaaccagaccttcagcggtcaggccgaacagattggtgacaaatacaccgactaacgccgcaatcatggtagtaaacagcagggtgccgatagacaggaaactgattttccccagcgacgccgcattatgcagcttggcgacggcacttaaaatggacgcaaataccaacggcatcacgatcatttgcagtaattgtacataaccgttaccgacgatattgaaccaggtaatagattctttcattaccgggtcgtcagagccatacaccaaatgcaggccgaggccgaacaccacgcctaatgccagaccagccagaacttttttggccaggctccactgtttgtgacgggtttgtgccaatagcaacagcaatgcgacaaaaatcgccacattaattacgagcggtaggttcatccccaaatctccaaaattctattatgaatactttttgcgtattctatttatattgctgaccttgataggtcgcgaagccaactatcctaacagttactgagttggctcacttatatccaaaaagaatttgatataattttttacgcaaatttgtataaagtatatgctttgggtgatgatttcggcagttaattgtgatcagagtttgaaactcttcaattgctcaacataggattggacgggaaatgagcggtcgctctgccagtaaacggcgtagcatactaaaagtacgcaaaacacgcgttccagctgattccctttttgcgaattgagcagaggcaggcgaaaccgccaacggcacggccacagcagtggtacgccagcaggcgtcagcatatccgccaataaatggctgaaatagccgacgatcatcgcatgcatgacgtcaggtgggataaaccaactgcggggaatttcaagctgaaataacgctattccaccgaggatcgctaataaactgtgggtaaaaccgcgatggccaaaaatccgtgcaataggcgcggaaatccacttcaagcgttgccccagaacagagcggggatggtcaatatcaggtagtagagacgtcaaaagggcgcccggtataatgtgccaccagtccccctgtgtaagctcgggagtcaacccggcttttttggcaaaaattgcgcaggcgacagaaaaaatcaaatgcccttccgcggtcatacaaacgtcccaaactataactgttaatttatccagtatatgggatttctctgggtgaagatagccgttacgctgtaactaaatgtcacattaggagtgattttagggtgaatgttgttttttcagacaatccacagctggcgcgtggctgggcggcggatattacaggaaatggaaggtgaaaaaaacggggaaaagcgactgggagtcagatttttccccaaacacgggtaacaggtttgcagcggcagttactgcaatactaatgatgagtattcaatcaaatcggacatactgaggttataacggtgaccaggttataacgacgatcagaaggtgtactgcacccccacgcggaaacgggtctggcgttcgtcggtcaggctgctgccagaaacattgccgatagccacataaggtttccagtttttatcccatttgtaggccaatttgacatcatgactccagtcatacttttcgttatttgccagaattttgtcctcagattttttgtaatccaactcatattcgacggagtaatctttcaggaagttataggcaaatagcagggtgaattgatggcctttctcagtatctttggtggaaggctggttacgtttgtaataagggcgatagcgtagagacgtagagaaatcgtcagtaaaggcaactttgccgcgtaaatatggccggtagttattgctgtctgatgaggattccagagagaagcccggttccaactggaaggtcttgttaaatttatacacatagctggctaccacttcggtaccattactgacctgttcgtgaaaaggtttgtttgcggtgttgtccgagctgtgttgccgccatttgccttccaaagaaaggccaaagccgttagcgaaacggttagagaacagcagacgatctttatgatcgttcgaaccgctatccagcatttcatgacgataatcgatagttgttgccacagagctgaaactgataactgatgccattgccagagtaagtaatttaaatttcatttttataatccctgagtgatgtattttcgcatcaataaagaatacattcttaaaaaagaaacatcgtttcatttattgtggttttatattctatttattattttaataatttttgtgatcgatgtcgtcattgttccctaataaaataaaagcattttaaacttgtgatgacgatctaattgattgtttttattgtaatttaatcaagcagaaaaaccccgccaaataaatggcagggtgagtttagtgccttattcttcgatttatcgcatggcgcgttttaaaattcggtcaccctgacgattaaaatattctgcagtttcctctacggttttctgaccataatcgatgtattgaatggcgtcgccaaataaagaaacaatttgtggatcatcgaaataaggcgaggttttcatttcgtgcggcaaggctaatgccatatttaggccagatacggacggatcggtatcttgaatagtgccgctggtgcgtaattgttcaaccgccgtcgcgctaagcggcacgccgcgttccaacccaagcgcttccacaccttctttgctgtttagcaggaagttaatcagaatggcgctttctttcggatgttgggtagatttgccaatagacagcatttgcgcaggtttaaagaataaaccggcatctttggcacctggcagcattgggtaggggcctaacaccaatttagccggttttttcaggttgtcggagtatttattaatggtggagttccacatatatgtaccggcccactcaccgttaatccagggtttcatttcgtacatattacttttgccgaaggatgcatagtatttggtcgaaggcattacatggctatctaccattttcttatacagagtaaaaaactccacccattgctctttgctataggcaaattttttgttggcttcgtcaatcgttggaatattgtatttttgcgtcatataagagcgaattaacgccaatgtgtcctgatgctctaaaacgacgggataatattggttgcccagtttttctttaaatacggcgcctgcggctagcagctcgtcccaattttttggatattctagacccgcatttttccaggtttcatcgttaaaatagaaaatacgggcggtaaccgaaatcggaataccgttcagtttaccgttaaccgtagtttgctgtaattctttgggatcgaactgatccaaatccaacgtgtctttgactttaaataaatcgtagaagcctgcgccatctttagagaaaatcggcagccagttccagttggtttgcatcacatccggttcagtactaccggcaatttgcgtagttaaacgagaaagatggccgtcccaaccggtatattcggctttaacgttaatattcggatgctgcttatggaattcctccaaagcttttagcgtgacctgatggcggccattaccaccccaccaggacatacgaagattaacctcatcctgagcaaaagactggtgtgataatagtgccagagtagaagctatcagcgtgtgtaggatcgcttttttcattgggtactgctcctgttaaagagagatgtttttttctgtttttgcgtcaaagatatggcatttatccatatcaaactggaaataaacggtacggtgcagtccgttctcaataatgggacgagcttcatcagaaggcagacggcaggtcaactcgaagtcatcgactttgacgtacataaagaactcatgccccatattttctacccgcactaattcaccctgagagtgatgggtggtgaaaggcgcttgtgacatacgaataaattccggacgcacgccgaagaaaactttttctccgctgtgtgccgctacttttctttgttgggaaggatttaataccagcgtatattgacccaccgtcaggccaatttgcccctcggtttctaccagtttactcggcttaatattcatctccggcgcgccaataaaaccggcgacaaacatattgaccggatagtgatacaaattgtctggcgtatcgacctgcataatatgacccagtttcatcacgcagattctgtcacccatggtcatagcctcggtttggtcgtgtgtgacataaaccgtggtagcagctttaccgcttttctttaattgcttatgtaaatcggaaatacggatgcgcattgatgcgcgcaatttagcatcgaggttcgataacggttcatcaaataagaacacgtccggtttttttacaatggcgcgccccacggcaacgcgctgagcttgcccaccagaaagttgacgcggcagccgatccaataaatcttctaattccagaattttggctgcttcgctgacctgagtttcaatttgttcttttggtaatttgctgagcttcaggccaaaggccagattttctttcactgtcatatgtggatacagcgcgtagttctgaaacaccatggcaataccgcgagattttggtgccagattattaaccacccgatcgccaatacgcacttccccatcgctgatggtttccagaccggccaacatgcgtagagtggtggatttcgcgcagccggacggcccgacgataaccataaattcgccgtcgtggatggtcagatcgataccgtgtaccgctctgaaaccgttggaatacactttgcctaatttgttgaaaatgacttcagccatgataaatcctcttttaacctttaattccgctgctggtgacgccctgcacgaaatagcgctgagccaggaagaaaacaatgatggatggcagaatggaaatacttgccattgccaaaatctcgttccacggagcgccttccgttacatcgatagacattttcagagccagcgcaatcgggtatttatcgacgctgtagacataaatcagcgggccgataaaatcattcattgaccacataaactggaatagggcgacggagataatggccggtttaagaataggcacgactacgtaccacagcacttggaaggaattacagccgtcaatttgcgccgcttcttccatatcacgcggtacgccgcgcaagaattgaatgagcataaagacgaagaatccctgagtagcaaaagctaagggtaaatacagaggtaaataactgttcagcatgcccatttcgcgaaacattatgtattgcgggatcaacagcacggtacttggcagcaacatggtggtaatcaacgtagcgaaccagaactttttccatggaatatcgaagcgggcaaaaccgtaggcgacgatagtagaggaaataatggtcagaataactttcgggatgacgtatttgaatgtgttcagcatataatggccgaaattatattcagtaccggttttccaaccattaacaaaaccgtctttcgttgcgtgctctggccatagtcctaaagtcgtgaagatctcgttattcggtttaaatgcggcggagaacatccataataatggatacaacattaataacccgacgataattaacaccacataacggagggccgcacttattttttcttttcgcaatgtccggctgatttcttcagcggcgctttgctgtgtagctgacagattttctgattgagatcgcgggttttgttggatatcagtcattttttcctcctttatcggcggagtagaacacccaatatttcgaagatttaaaggcaatcgaagcgaataaagcaacaaccaagaataatatccaggccaatgcggcaccgtagcccatgtcgaaatatttaaatgcggtgtcataaatataaagggagaataaataagtgtagtgcgttggcccgccaccggtaataacgtaaggggcagtaaattcctggaaggcctgagtggtttgcataataaagttaaagaaaataaccggtgtaattaatggcaccgtgactttcataaacatttgccatttagaggcaccgtctatcatggcggcctcatactgagactgaggaacgttttgcaatgctgcgaggaagataaccatggcggaaccaaactgccagacgcgcagcagtgttaccgaggttaacgccaaagaaggttcgccgagccagttaaccggatcaaagccaagcacgccaataaagccgttcaataagccgtcgatggcaaatagcgcacgccacagtaccgcaatggccacactgctaccgaggattgacggaatataaaaagcggtgcgaaagaagccaatgcctcttaacttaaaatttaggacaaatgcaatgcctaaagcgaaggccagctttaatggaatcgtcaaaaatacataggcaaatgtaacgcccatggatttccaaaataaatcgtcctcagttagcatatgacgataattctctatcccattaaatacgggcggattcataaggtcatattcagtaaaactgagaaagaaagatgaaacaaaggggaatgccgtgaaaactatcaatcctattatatagggagagatataggctaaccccagcattctgttttcattcataatgcttacctattttattaaaagaaaaagctaaattgtctgactcaaaagagtcgggtaaatgaaatcgatatcgtaaattacgttattgctgccattcctttgatagtccccgtggatgtacccaccattagtcaacaataccggcacttcggctaatttattttctttggcagcaattaaggttaataacgttaaagcaataggatcatcgatgcggacatagcgatgttgtgcagactcaacaaataatccccgatggtagtgctgtttaaataatgttttccctacgcgccaggcgagattaaacaattgttgatcctggcaatgctgcgccagctctatgaatgctaaaagtaaataaggggaggctgccggtggctcaatcgctaatagggtagtgtgaaaaggtctctgttttaattcgaccaaatttaagcgtttcaaaataacgctgattaggtcgaacaactcatcgtcgttgcttaaacgccaggcgcgtaccagtggcaataaataatcaggatttaaaggacagggtttgatttcgcagccttttgaaccgtaataaccgtctctgggaagaatatagccagtcatatcctgaccgtcgatccacaaggggcgcagagtattactttttagatcataggcaaagcgatagtaatttttgagtccttcaatgacccatttttccatttctgcgtcgggatgttgacgcagaatatccaacattgccagtgggttatccactagtagcgggcgcatatcgcggaataatacattggcttctcgcgctagatagccaaattctgcgccaaactgacgcgccgcccgatcgccataccaagactgagtttggttatcatctgcggggatcggctggcgttgcaacggtgagctgaattgataggcaggtaaaccggtttcagggtgacgtgccagaacgtattgacgatataaatgttttccccaggccgcagcctgatcatcgccagtgaaggcggcatatttaaaggcggcatagatcagatcggtgccggcgttgacaaaggttaatcctttggtttcaggcaattgtggccagagcgcgggatcgacaacatcgtggcgcggatgtgcaaaaacctgtgggtctcgtattttgctgtattcaccgtggcgacctaaatccagcgttttccaatcgtcaacgtgtgcatgccaaaatccttgtatgaaattcagcgtggattcacgatcgatttctgctaaaaaatcataataaggaaggtggtgcttaagctcatgcaccaatgattttgatgctggcccttcggaactcagggtatccaagtgaaagaagtggtgcccaccccaggcaaacaggccgctggcggtatgaacgccatgctgtaagaaatagcgcgtttggatttctgctcgttgccggtactgtgggtcatgagttacctggctgagcgctgtcagggttcgcagccaattttgctggctggcaaaattcgaaataggcacccgacgaccatcagcgaattgccagcacaccggctgatgggttaccacatcgaaaccgtcggctagcagcggggtgggatgaatctggctttgaccaagagtttgcactgaatctgcatgctggcgaatcgccgtcagccactgtttgatgtctgcttcgctgcctttaatgtcgcctgcaaaatgcatcgccgtcacctcttggtggaaccaaattacagttccttataaatagaaacatcgtttcaatacattatatttggatttattggcgagtcattgagcgaatgataaaagtgtgatctaagttggaacgttgttttgatttttttaagcgatgagttttaggctgcaagtgattcaagaggtttacttttaaattaatgatatataataagaaatatacggtgttaggagtggcggtattatttcgcgcaggcgagaagctttacaataactttagtgtattgattgtaatcataatcataatcatgctttcgttgtgagacagatcgtgtccattgaatttaggcaacacaaaagcacagcgttgcgcgccgtgcctatgaagtttattcgtcagaattagcgagctaaccaaccaccatccacggcgatagtgtagccactaatataatcggaggcattggacgctaggaataccaccggccccatcaaatcactcggtaaaccccagcgagcggcagggattcgatccaaaatctctttgctacgttcttcatctttacgtaattgctgagtattgttggttgccatatacccaggggctatagcattgacgttaatattgtatttggcccattcatttgccagcaagcgggtcacgcccattacggcactttttgaggcggtataagaaggaacgcgcacgcctccctggaaagacaacattgacgctacgttgatgattttgccgccggtttcctgcttgataaattggcgggcgaccgcctgtgacataaagaacaccgttttgatatttacattcatcacatcatcccagtctttctcactgaaattgatggcgtcttcccggcgaataattccggcattattgactaagatatcgattttgccgaattcagcgaccgcttgttccagtatccccggaatacaatcaatattgctaagatcggcggtcaggctataaaaacggcggcctaatacagttattttctgaatggtttcctgaggttcaacaatattaacgccgacaatatcgcagcccgcttccgccagaccaatagccataccttggcccaaaccagtatcacagccggttaccagtgcaactttacctttcaaatcaaaggaatctaaaatcatagctgaagtctcttttcatgcggtttattgatggccgcgatagcaagatcatgaagagaaccggtatttcccagctctccaatcggtcaatattccatttggacaatttttaacgtaggtcactcaccgcgatgtggtccatatcgccaaagacctgattttcgcccaccatgccccatatgaaggtgtagcgcttagtacccacacctgagtgaatagaccagcttggcgagataacggcttgttcgttgtgaacgagcagatggcgagtttcctgcggttggcccatcatgtggaaaacggccgtttcttcatccatatcgaaatagaaatacacttccatacggcgatcgtgggtatggcacggcatggtgttccacaggttgcccggagccagtttggtcagacccattgtcagttggcaggttggcaatacgtccggcacgatatatttgttgatggtacggcggttactggtggcatcgtcacccagtgtttgcggtgcggcttctgccagcgtgatttttttgttggggtaagtggtgtgagccggtgcgctgttatagtaaaactttgccggttgagtgctatctatgctactgaactcaacgtttttcgcacctttcccgacatataaagcttcttcgttagcaatttcgtaagtctgaccgtcaaccacaatcaggcctggcccaccgatgttaatcacgcccagttcacgccgttccaggaagtagctcacgccgagctgtttccccacgtcatccccaatgctgacggtttgggtcgccggcagaactcccccgacgatgatgcggtcaatgtggctataggtcatggtgtaatcatctgcgacaaaaatcttttcaattaagaattcgcggcgcaggccagcggtatcgagttgtttggcgtggtcgctatgaatgctttgacgaacttgcatgtcagtgcctctctttcagaacagtatcttagatgggtaagcccgcaggagaaacgcagtgtgccgttgagaaagggcttctagtacgaagcttttttctttctttagccagctacgtttctggtgatgttgaggataatagttcgtgtgggatgacaattcaataaaaatggaactatgttttattatttttttgagtgatgtcatgaattttggtttttccccgcgatttacacctttggtgccagtagaatgcaaaagaattcgcgagctggccgtggtttaactgcgataggccgatttaacttcatgagggtgcaatgatgcatatgttctttatcaatgatgaaactccgtgggaagtactaggaaatgggatcaagcgaaaggtgatgacctggagcgacgaattaatgatggtttgcgttcatttcgataaaggcgcaattggtgtggcgcatcagcatgatattcatgatcaaatcgcctatgtggcggcgggaagttttgaggtagaaattgacggacaaaaacgcatcttaaaggctggagacgcctatcgggcggtaaaatatgaaatgcacggtgcggtgtctctggaagctaatagcatgctaatcgatactttttcaccgaaacgtgccgatttcctgtgacacaaaggatcgcttaggaatgctttccgaagagataaatgaagtgatggggaatgaagggggaactttcccccttaatctgccacattatcaaccagagttagcagttaaatcgggcggcgtaacgagaatatttatctgtacgatgatttaatgcgagaagcgtattgtccagaattctgccatcttcctaagcctataagcctaataaagcgttaagctgggttaagaaatgtcttcaacccgaagttcctctaacgaatccagctggatatctgccagcgcccagcgaggatcttcacgtagctctgccgcaggaatgacgatagaacgcattcgcgcagctttggtcgctatcatgccgttaaacgaatcttccaaggtcacgcattccaatgggtcaacgcccagctcagcggcggcgttcagataaacttcagggtgcggcttgctgtaaggcagatgttctgcggacatcaaacagtcaaagtatttctccaattcgaacatggctaatactttttgctgcatcaccagtggggacgctgacgcaagaccgattttcaacccctgacggcgacacaattgcagcgcgtattcaacgccgggaagtagagggcgggtttgctccaccagttcaatagagcgggcaataattcgacggcagacttccgcttcgtcggggccttgccaaggttgggttttgtaccacagcttaaccaccaaatcgatgcgtagccccagagtgttgggcaatttgtctctggacgtggtatccagccccagttcactgaatatatctaactcggcttggagccaaagcggttcggaatcaatcagtaaaccgtccatatcaaaaatagcggcttttatcggatgcagattagccatcaatcatcgctcctgtcggttggagatataagagaaacacactgtagcattgtgctgccgttacgctaaaactattgctgcgcgttgtttcgcaaaaccgcctgaaactgggtttgcagcacgcaatttgcctgtaatgataaataaattgagtttttcccataagaacatccattcgctggggattaataagctaggcttggatgacgcagatcgatgattattacggtgaaatcattgcacacctgacagaaagtacgggtaaactgtaccaataaagtgtggcactcataaggggaactcatgacgtatcaacaggctggtcaggtcgctgtggtcaaaaggattgccggctggctggtatttattccggcactactatcgacgctgatctcagtgattaattttgtctatcattacagcgaaaaaactgcgggtgtaaatgcagtaatgttggattttatccatgttatgaccgatatgatccgttttaacaccggttttttgaacatattttggtttaactcgccggtgcctagtctggatgcggggttctctggtgccaatatcatgttctttatcatctacatgctgatttttgttggtttggcactacaggcttccggcgctcggatgagtcggcaggtcaaacatattcgcgaggggattgaggatcagctgattctggagcaggcccgtggcagcgaggggcggactagagcgcaattagaagaaaaaatcgttgtgccgcgacacactattttcttgcaagtgtttaccctctacattctgccaatcattatcgctgcggtggcttattttgttattcagctactcggcgcgatggccgcgggctaactatcttgcctgaaataaacactgtgtctgaaataaacactgcgtctgaaataagcacagtgtctgaaataaaaaagcctgtatccgcgaggaacaggcttttttaacggctaatagcgatttattcagggtgtaacagttgttctaccgctttttgcgcggcaaccaaatgttgaccaccaaataggttactgcggtttaataaatagtagagctgatacagcggttgccgttcaataaaaccgcttggcagtggccaaacgctttgataaccatcataaatttgagccggaaggtcggggtagagcggtagcatggcgagatcgcattctctgtcaccccaatagcaggcgggatcaaagataacggggccattggcgctggcggcgcagttagcaggccaaagatcgccgtgtaaaagggaaggctgcggctggtggttttgtaatttcgcctgaactaaggcaatgatttcgtcaatatccccgaaaatcatgcctttctctgccgctagctgtaattgccagccaatacgttgctcggcaaaaaattgtgcccagcgccgttgccatccgttcggctggggtgtggtagacagatcgttatcgaaatcaaggccgaactgtagctgttcactccattgatgcaaatgtgccaactgctgccccagacaataggctgagtgcacatccagagatttgagtggcaaatactccagtaataggaagctgctgtcgtcgcgatcgctaccaacgccgtaaacctgcggaacacggactgttttactgcgagcgagcagggagagctgatcggcctcggcggtaaaaataggcaacatatcccgacgatcgcatttgacgaatacatctgtatgaccataactaagtcgccaagcttgatgaatatcaccgccgggcagttcggtacgctcacgcacctcggcatcgccgagttgttcgcttagtagacgattcactgcttgccacatgattcacctcctcagagctgccagttatatcattaggttaacgtctttaccgtgtaaaaaacaggagctggcgcacagggatacactcgccgaaaacctcagatcagtttcaggggtgaatctatcgagcgtcgaaaggaggaatcccgcgccgctcaagagcaacgcgggataaagtacgcgtggaacaattatagcagcttagttttaggctcaccgtcagtgctattttgtcctactttacccagaggacgggggcgtttaaccggtttaaaatggctgtatattagcgccgcaacaaagaataaagcttgaacgataacgatgcaggggccggtggctccatcaatatggaaactgatcaaggtacccaacacgcaggcgataaccgacactaacgttgccacaatcagcattttatcgaagctgcggcatagcataaatgcaatgatgcctggcgcaatcagcatggcgatcaccagaatgaccccgacggcttgcaaagaagcgacgatagtcatggctaacaggcacaacaaaccgtaatgcagcaatttaactggcaaacctattactctggcgtgattaggatcgaagcaatacagcatgaaatctttgcgtttcagcaacacgaccagcagcgttatcgacgcaatccatagggcctgtttcagttcatcctgcgtaatgcctaacatattaccgaatagtatgtggctaagatgttgatcggtatccatacgggaaaatagtacgataccaaaagcaaacatgcctgaaaaaacgatgcccatcacggtatcttctttcacccggctgttatctttcaaataaccggtggctaccgcgcaaaaaataccggaaacaaaggcgcctatggctaaaggaatgcctagccagaatgccagcacgatgccgggtaataccgcatgagaaatcgcgtctcccataagcgaccagcccttcagtaccagatagcaggacaatacggcgcacactacgccggtaacgaccgctgccagaatggcgcgctgcataaagggataggcaaaaggctcgctgagcagggtaaatagagtattcataggctatctccctgcggttttaccgtgctgttgcgctttctgtgaatgcgaaaacgcgttgccaacaggccgtgtttgggagcaaagacaaacgccaccaggaaaactaacgtttgtagcgttacaattacgccgccggttgccccatccagatagaaactgagataagccccgaaagcgctggttaacgcgccgatagcgatggcaaggattagcaagcgaccaaagcggtcagtcaggagataagcggtggcgccgggggtgacgaccatggctatcaccagaatagcgccgacagtttgtaatgccgctacggtacaggcgcttagcaaggtgaagaacagaattttcaatcgtagaggagaaatcccgatcgacatcgcatggttttcatcgaaaaacactgccagcagatctttccaaatcacgcacagaataacgaaagaaaccagaatgataatttcgacctgcaatacatcttcatcggcgataccgagaatattaccgaaaataatggattgaacgttcaccgaagttgggttgagggaaacaatcaacagcccgacggcaaagaaggtcgaaaatataaaaccaataatggcatcttcccgcagccgtgtgatgtggcgcactagcgtcatggcaagcgcggccagcataccggtaaagaatgcgccagcggcgtaaggcaggccgagagcataggctccagccacgcccggcaccaccgagtgggaaagagcgtcgcccatcagcgaccagcctttgagcatcagataggcggaaagaaaggcgcaaaccgctcccacgatggcgctgacccaaatagcctttaccatgtagttgtaattaaagggttgtaacagaatttccagcattaggttttcttctccttttgctgacgctgcgccggcgggctgtctttggtctgaccatagaatactgccggacgttcatcatcggtaatcaccgtcacggtacgcggatcgttatcatcgtgcagatcgggaccggataggttgatatggcgcaggacgccgccgaaagtgatctccagattcttttgggtgaaggtggtttcagtcggacccgcggcgagtacggtctggttgatcaaaataacgtgatcgcaaaattccggcacgctacccagattatgcgtcgatactaaaatcagatgcccttcgtcacgcagcgcccgcaatagatcgataatggcattttcggtctttacgtcgacgccggtaaaaggttcatccagcagtaaaaccgaaccttgttgtgccagcgcccgggcaaggaacacgcgtttcttttgcccgccggagagttcgccaatttgccgcgagcgcagcgcggttagtcccacgcgctcaatggctttatttacaataacccgatcctgacggttgggaattcgcaaaaaattcattttcccgtaacggcccatcattacaacgtcttccactaataccgggaaattccagtcaacttcctcggtctgcggcacgtaggcaatgatattttgtttgagtgcatgaataaccggtttcccgcttagttgaacgctgccttcagtgggtttgaccagccccataatacttttgaataaggttgatttaccgctgccgttcacgcccactaatgcgcagatagttcccccgtccagggtaaaactggcattgtggatggccgtatggccgttgttataagtcacagaaacatcatcgactatcagttcaggacgaacaaaatccgcattaatcattggccaaatccttccgcaatcgtgttcacggtggtattgatcaagtcgatataagtcggcaccgggcctgtcgcattcgacaatgagtcaacataaagcattccgccgtatttggcgtcggtttctttagcgacttgtctggcgggtttatccgaaatggtactttcgctaaacacgaccggaattttattggcgcgaacgatatcgataacccggcgaacctgctgtggagagccttgctcctcggcgttgattggccacagatacacttctttgaagccataatctttagccagatagctgaatgcaccttcactggtggccagccaacgctgacccgctgggattttgtctaaacgttcgcgtagtggggtatccagcgcgctaattttctctgcataagctttggcgttacggttataagtttccgcattagccggatcgtgtttttccagagctttacggatattatcgatataaatcagagcattggtaggagacatccatgcatgaggattaggaatgcctttataaggcccttcgcgaataggcagcggtgtaatgcctgcggtgacaacgacggatggaacgtctttcacattctcaaaaaagcggttaaaccagcgctcaagattcatcccgttccagagcactagatcggccgactgagttttgacgatatcttttggcgttggctggtaatcatgaatttcagcgcccggtttggtaatggattcgacgatagcggcgtcaccggcaacgttttgcgcaatatcctgaatgatcgtgaatgtcgttacgaccttaaacttcttttgggaggtcggattatttgtggcgaacgcggtagtactgacaaatgagaataatgccaatagcgcaaacagggtaaaacggcgtaaaaatatgttcccggtgtaagtcaaagcaggcagagaggtttttttatactgatataacattgcgatgctcccttttataaatgaaaatgattatcaatatcatttggttttaagtcaagtatcaccatacaataaagctaagtttactgatagttacgttatatcacctgattattatgtttataatcgccaaaatgtaccaaaaatatattttggcgtgatgacaagttgtatatgctacaaaacggcctaccaaagtggggaatactgtgaatccaaaactaggttgccttatggcaatattattgttggctgggtgtgctaaacagacccctccaacacagtcgaaaaatggttggttgaagcccccgcaacaggggaagttcaatccgagttccagaactgatagtggaaccgtagcttataacgaatacataaagcaggccgccagccattacggcgttgatgaaaccttgatcaaagccattattcaggttgagtccggctataaccctgaggtcgttagcacctccaatgcgatagggctgatgcagattaaagcctctaccgcggggcgcgatgcctaccgtatgaaagggcgcaacgggcaacccagttcccgcgagctgaaagacccggcggtcaatatcgatattggcaccgcctatattaatattctgcaaaaccagcagttggtcggcatcagcgatccgcagacattacgttatgccaccattgtttcttacgctaacggtgcaggcgcgatgctgagaaccttctcctcagacaaaaagctggcgctcaataaaataaaccgcctcagcccaaacgaattctatcaacatattcaaactaagcacccagcaccgcaggccccgcgttatttatggaaggtggacacggcttaccgagcgatgacggaataacagattaaatcgctaaccgatgcatcttgcaggcagtatttcatcggttagcgtttatcttcattggtcaaatgtttctgtctcatcccgcgccttaatttctgatatttacactcctttgcactttatcccttattgcattcattaatttattgctaatgcgtcacgttatcatttagtgttttcctcactgaaataataaatttgctgtgttttgccaaggagccataacgtgcgattaacgctttccctgacggcactggtatgtgcctcgctgttttctacttcatccctggcaacaacttatccggtgacgattactgatactgatgggcagaggctcactttcaagcaagagcctaagcgtattgtgatgcaagacggaagggacattctgacattggctttgctggatcgcagcgatccttttgagcggctggtggcctggaataatttgctgagaaaaagcgatggcacgacctggaatctgcttagtagcaaatggcctaaggccgaaaaaataatggatatgggatttagcgataaaggcgaagttaatctggaggccgttattgcgaaaaaaccagacttaatggtggctcagcttcgttctaagagtttattaattaaccttggggtgttagataaactcaaacagctaaacatccctgtgctttttattgataccaacctcaagccactggaaaatacacctaaaagtatcacgctgttaggtgaagttattaatcgcgaagctgaggctcagcagtatactgatttctatcaacagcattaccaaaacattatcaacaaaactcgcagcgttgagccaaaacccttggtgtttgtggaagctaaggcgggtttgggcggggtcgaatcatgctgctttactcacggacatgtaggctggggagcgctgattgaagctgtcggggcacataatatcggttcagatttattaccgggagccacaggggatgtctcgctagaaaaggtcatcgcgctgaaacctgcggcctatattgtctccggttcgcagtgggcaagtaagaataatgcggcagtacctttcggctatggggtgacacaaaatcaggtagatgttgcctttaccaaattaaaacagcgtcctgcttttgcgcaaatttcggcggttaaagaaaatcggctatacggggtttatcacaatttttacaatcacccttataacattgtagggatggagtatctggcgaaatttatctatccggtacaatttacccagctgcagccacaggatacttataacgaaattattgccaaatttactcaaattccgacagaacctgctattttgggggcgcaggcttcggcggtgaagccttaataaaataaacacatttttaaaaatagcccctgattggactgcgccttactaggttgggcactcaatttaggggctttgacgttttacatagccggatggaaagttgaagcaatttccagcacaccattaataatgaattgcacgcccatgcaaactaataagaatcccatcaagcgggaaatagcctcgatgccgcttttccctacccaacgcataatggcacctgagctcaacaagcatccccacaggataagggatacgacgaggaaggttaataccggagccacggccaatacccaaggagtaaaatcggtatggtctttcatcgtcgcggcggaactgatgatcatggcgatagtacctggcccggcggtactaggcatagccagtgggacaaaggcgatgttaacggagttacgcttctttaaatcctgtgatttggcttccaattgggtatcttcggtcgattgctgagggaacagcatacggaaaccaataaatgctacgattaatccaccggcaattcgcaatccgggtatagaaataccgaaggtgctcatcacgacctgaccggcatagaacgaaatagtcataataaagaagacgtatatcgaggccattctagactgattattccgttcctctgtggtcatattgcccgatagtcccaagagcaaggctacagtagtcaatgggttagctaagggaagcagcaacactaaccctaaaccaatggccttaaataactcaaaaatacttaacatcaatcaaactccacaaacttagtcatatccctgaaaaccaaattgggcattaccttgctattttgtctcaaataagacaaaaaatgcataagaaacccatcttgcattgatgtgctctatgagtaaaggcgcataaagaagatagggggagaagatcggtgtttggtgttgtgtgatccggatcatagctcgacagtccggtagttggttcaccgccaaaaatatcgaataatcataagattgtatcaatttcggggaagggtacttttgtgtgtatttgtgatatcagcgtcgaagatgaatatgttcgccagccactctcagcctcggcagcttgggttttggatcgccaggctgctcgttcccgtgggcgtttgcgtttcctgaaaccgaaaagagagcctcgtcctcgttggcgtctggctccattaaaagacacttatgaaatccgtttttatcctcagcgattacctgaactgtggttcttcagtgctgaaagtgcgttgcgtaaacgcttataatatatagaaatgtacgtttggacatttcaattgtctgacccaatgctccaatcaacccccaaaatgccgcctcttatggtggcgttttttacgtaattgaataaataacctttactgacgatttttctgagaaaagaaagcgctattttgccagatcctaaacggttgattgacacccgcgcctgttgaatataatttcaaatatcgagaataataattcagttggtatttgtgatgtctaacccattaacaccggtagaaaaccagttttatgcttataacgctcacgatttagctgcattttcagccaactttagtgaggattttattgcctaccgtatgccgtctttagaaccatcaattgttggtaaaatgcagctggaggccttctatcgtacccagcgttttaatcaggccgagttaagagcagagttaatttcgcggtcggttttggggaataaagtttttgattatgaaagaatctatggtttaagcgcagagccaatcgaaagcgtagctatcttcgaggtggttgaaagtttgattgtaacagcttggtttttctataaatagaatgatgaagcaatctcgccgttgatatctgcgtttcaataaaccgtagatatcacggcgtttaatgttatagttaaatggctattagttaaatacctattagttaaatgcatagataactacgattttttccctgaataaggtctaagtaactcatccaatatttccattctttcacccacagggatgtagataaaacgacaaaaccaaccttttatttccttattttttacttgtgtccgtaagaaatatcggtgaaatacttttaggtcatcttcaatgttactcatgatttattccttttactaagatattcatttaatactaaacaataaaatagggaataaacactgatgatattggttatttttgttcatgttttctaaataattgaaatacatgcatttaatttgtttctttaaaggcgtggtgcaggaggttcatttcttctgaaaacatcacacctggtattctggatgaaaatcaaaagcacgccattatctgataaccaatggcatataagcatcctattataattaaggtgaggccaatagctaaatacgataaaggaatgcaaattcccgatagttcactccataaacgtttaaacattttcacttccttgtgtaatcagaataatgatgacaaataaataaataagataaaaatcggttcttcagatcaataggccatgattgatcggtgaaagctattgtttatctcgcgtacacttaatttgttgtgataaatttagatgaataagtgaatggtaacgtttggtgatgcccttgagcgacattcaataataagtatctattaaatttaatgtttattaatgggattgaaataaatttattttccagcatcggtttaaatgagcgtgctaattttactttttatcagattgattatttgcatatagcatacttcgccatgattaggcgtgctaaaagctgtttcgttatgatatgggtaaaggtggttaggataagcgtttagtaatttgctgatagatagagcggttgcattggggaagggcgatagataagtgaatgatttggtgacaagcgacatgggtcatcaaaacgaacataccgataagtgatgagctgataaaaagcctagacgctataatattaaaacgcctcggctgcataaacagtcgaggcggcgttccagtaaccattgctacacggaaacggaaacccattatgagcagctttttctggaatagcaatatggatgatgggaagcttaagtgattaaattgcaaattttcttatatcgaagccctcccaaagagggcttgatggggtgatgaacctaggcgattaactatgatcagaaaggaggccagtagtgggtctgctcatgccagcctcttttatacatacaggcatcaataacggcattgcgagctgatgcattacgatctttctgaaccgttttaaattcaggttctttctcgtagcgatatcccttgtcacagccatctttacccttttcacaggatttgtatttatcctgataagagaattcaaaatcagtcacgatatcgggactgtgtctctcgtagccaatagccttacattccgcagaatctctttcgcggtctaactgtgtagcaccacctttttcccattgggtacaaccagaaagagcaaggatcaaaagaacaaaaagtgagttaaaatttttcatcattatgtcagcaaaagttttcggaagaatacgcgaagaatccgtttcacggttctcattcacgagtaaggaacggagagtaataaataaggcatcagtaatgcaaatgacaattgagtacgtttatcaatcgttgagttattgatgattatctgaacgattgatttaagtcgaggaaatctgtctgtcatcaccacaaaattgaatttttttgtacgtaattcaggctgattccacttcttatgataataatcgcagcctgtgtctttataaatgagactcaaattggcatcattgcgttagaaatcactttttaggatggatagttatgaagcagtttcctttcgaccaacgttatgaaatcgaaaatgcgagcggtgaacgtgaatatttcatcgaaggtgatgtatatattcgtttactagaaggatctccagtttaccgtattgatggctatgaagtttatactcatggcgataatggtgaattagtcggttttctggaaggtgaacgtattacccgtttggatggcgaagaactgttagttattttaactcaataacgctatcgccttcgactcgcttcgtatttgaaaactattggactcgcatcagataagaaatcgccacctgtatttcagagcgtaaatataggcggcgattgatagctacaggaagatgaaatgcgttagaaacggtaatttaacatagtcactaacacatcatcggtgctgatacggttagcacgagtaaattcattttctttcaacaagttaagtttgtattcaacgatcacagccatattcttgttcagatcataagttgcggcaagatcgataaacttcaccatatttttgttgtcgccaaattcgctttcgagatttttgccgcgtccctgcaaataggcgatcgatggacgtaaaccccagtcaaattgatattgcgcgacaaactctatggcctgagtctggttggcaaagccatcttttctaccgacatagtgcatatttcgcacatccgcgtacatggcggccagataaatattgttggcgtcatatttcacacctgcattccaaccgtcggcttttttaccgcgatgatccaactgttgctcatcggtacgtttcgatgcggcataagatgcgccgaaactgagaccattatccagcgtgtacactgcggataatcccataccatcgccgttttggttagctacgctacgcgggttattggtacgtggacctgtttgatcttcagtattattccaaccgtcgtttttgccttggacctgaagtccgatatctagtccatctaccaaattgaatagattgcggttacggtacgttcccacattgttggtacgataggtcataaagttatcggtattatcgtaactctgtccaccaaatacaggaataaccgcgccggtccatccattaatatcgtttaatattccgtaattacgaccgtaatcaaaagatccatattcaccgaagctcaatccggcaaaagcaatacgggtagtatctttcttagtgcccgcactttctgcctgattcattttgacgttatattcccatcgggcatagccagatagggtatcgttaattttggtgtcgccggttaaggtaaatttaactttagactggtcgccagcaaaacccttatcatcggagaaataatggcgaaccttaaaagaaccggaaagtgcaatacggttgccatctttattgtagagctctgccgcaccagcgggttgcaccatacatgccaaaggtactattactgcaaataatttcaaattgaataattgcgatttcatcttcttccctggtttttgttatacaaaattatttccgcagtaaattaaccaagcgtgatatatttttatgcgatgacgctcacagttatccttatgcaacaaatatgtacaccacaaaaatttgaagctgctcgcgttttaatctcactgactgaagataatagaactggtaagggatgaattaattcttaaaacaacggtaaggcagctaagatgaaaaacagaacaaaggcgctgagtgcattagcattaattttcagcagctattttagtattcagcacgcaatatcggcaccgtcgaccgatattttccccggggcaacgctgacccaattacagtcgcaataccctattcattgggtctctgtagagcaaatttctgcgagtttgaaagggaaagagccaattagtgtaggttttgatattgatgacactttgctctattccagcccggcgtttttctacgggaaaatgatttactcacctgatagttttgattttttaaagaatcctaaattttgggacgaagtcagtaacggatgggacaaattctctgtgccaaaaatttcaggcgcagccttgctaaacatgcacttatcgcgaggtgaccgggtgtactttatcaccggtcgaccaatgccatcttccgggaaggaaacggtgacaaaaatcttacaacaggattttaatattcctgatgaacagttaaataaagtgatatttgccgggattggcgatggagccaaagtgagccatatgaaggaaaaaaatatctcgatattctatggagattccgataatgatattgctgatgctagagctgcaggagcagaaggtattagagtgttacggccattaaattctaccaataaacctatgcctaagaatggtgattttggtgagaaggttgtcattaattctgattattagttcacgctaatattggatcgggattgacagcgactcaaggtaagtcccgtacttactgacattgtgagtgtagcaatggactgtattatgcccgttagaggcaaaacattatctttatttattatgactaatacaccagaagaaattgaacgacctattttacaactctttcagaagtatccacagaacaaatatagcgtgcaggatgtaatgaggagcctacaggaaattagccgctataaaatagaatatcggttgaaaaaactcgcaaatagaaggctgataacctgccacaaacgcaaggtgggaatcgtcattcgttactattggcaactaaacgagcgtaaggaataagctcagtggcgagtgattacgtagtaaaaatagcgattgactttgatttatcggtttgttgtttctcattttcgcagagaaaaaacgtcgcacaaacatatatgtttttagctacgtaacaaccggggcacatggttaggtataaaaatacaaacagtggaagggcgggcacttccactggcaatcattctaggctaggcaatctttcgacaaaggtatttatctttgatcacgccatcaaagaaacgccctttagacaccacagacataaaatcgttataaacccgtattggcacgttaacatactgataaatgtcattaccacagaactgtatttccaatacatgactctctgggtcatacccaattgagtgaattctcgaagatgaaaccgactgtcgctgcaagaaatagtcctcctaggtgaggtaaacgtccctgaaaaaaatacatcgtgtcttaagtgtgtgcgtcctaagtacatcatactcgctgaatcgatatgagtcataaatacatttgtgaatgtataactcattgtggctaaagctattgtatgggcttatgaattaaaaaggtaagtactttaatgcccgtggctttgacagagcgcaaccacaggaaggttgttttagtatataaccgcaaaattccagctcgacggcacttggcagctgcaaagcatcactgatatcttgggtatggtttattgaatatgcagattggtcgcgggttttgggttaaacgagggaatatatgtacaacgacaatgaaaagaaattttacgttattttaaaccgcaattgcgagactccgactctgtttaacgcggcttgccatttaaccgcaggaataacagatttgatcgaagaacgtgaatttcattcttatcccagcactatagagggaatcagcgcaaatatgagccactatcctatggtggtattacaggcaaaaaacagtagccaactgagcaacttaattttgaaatgccaggagcaaggtgttttgtataatttcttcaccacgacgatgctttcgcattcagcggaacagcaaatttctgatacggcaaacacagactttgaaaaattggattttgtcgctgtagctttatacggggatgcagagatgttgaaacccttaaccaagaaattttctgtctatcgttagttgaaagcgcagggggattatttaggaagaaatactcccccttggctgcttttggcccgcttttcagtcggcgaattgtcatttaggtaaccgctaaaacccaaggtaaactaccggctctgttgtttgaaatatcgccgaatacttaactattcttcagtattcaaggatttcagctctttactgagagaaatcgaaagtacgattcgaatcacgacaatagaagctagaatgattaattctttgtaatcgggttcaatgatcgtcttcaaaatgtctgccgggattaatatttccagtgccagcaacagataaccacccaaatccagtcgaatacgttgaatatttgattcgccgcgctgcagttcgttttttataaatgcgaataggcatttaaccacgccataaatcaaaactaaaacgctaacaatatttagcccactggctgccaacatgatgaaagtatgaatgttcattattgggttactccctgaatagtaggccgttttcccttgtcaccgcgggcgcgggaagcgtcttcagtatagccctaaatactggccgtgggtgttctcacatccagtcggctgcaatgtagattttagtggtgcagaatttgtcagatttaaaataaataagcgacgaaggtaaagcagcggtgaaggttgaaaatgcttcaccgctgagccataaacaaggctatttaatcatgattatcttagttgtgagaatctcgtagcgcttcaatcgctcgttccaaagagtcaatatcattgcctgatagcaacggtatgattttgttaatttcctgctctggcaggtcataaatttgcagtgctaaaaggcggcgaataatatcctcagaaaagcgggtctttattgcgctagctggatttcctccaacgattgtataaggggcgacatcgcgggtgactatgctgcctgaggcaataatggcactttcaccgacggtaactccgggcatgatcatagctctcatcccaatccagcagccatcgctcaatattgtgtcacctcgatgctgataagattcgctgatagattccataaagggatagaagctgaaccaatcaatgcggtgagtatggtttccacccattaaaataacggcttccgcgcctatacatacataattgccaatgatcagttggtcaatctttccgagaggttcccactgttggctaatggcatcaccgtgcagatagcgaacaaccgatttttcaaaaccttcatcccagcaatggctgtaatagctgtgcgtacctttgatgatgatattaggatttttcaccgtttggtgaagtagctctgttttcgaccaatgtttatcttgcatggtctcattcctttttcaaaaacatccgagccacgaacgtaagttagtggcagtgattacacgttcaaatcatcaccgccggttaagcaattcgaggttgtaacagtagggggatatttatcatattcaatgcctcttttaaccctgaaatgctattgctcattgccaaacaaatcaatgattcagaaccggagatttagcctttatttggctttagtgtgaatcttcctacgtcaaaatagggaattaaatgcatttaatcttaacccgctatcacaaaaacgcatgtggggcagagcgtttgagaaactaaagggcagggatatcaacattcccacttctgcgggtggataatcacatattgtgagtgttactatgttttgtcagttattgcgtcacaccatagatacaaaacgagttgtgtacatatgagtgtatatatcaggcaaggtaaagtcggatagcgcacataacaaattgaatttaaactaaattatactgttacatgtgatctgtcgtgtaagcaatccacctcattcccactcgttcatctccgtttaagtcctcgcagaaagccactaaccatcaagattctcggcactatacccgttcatgactgtttcactttgttctattccgtgcgttaatatttgtgtaccaaattgcgtaccaaatttgccggagtaatgtcgtggcgctgaatgacacgaagctaagaaaaatagtcggaaaaccctacgatggcccgactgaacttcctgacgcgaatggattatctgtccgggttagccctaaggggctagtttcgtttcagtaccgctatcgctttgctgggaaattacagcgcatgaagatcggcacctatggaactatgtcgctaaaagaagcgagggatgctgttgaagtgtgccgccagcacctcagtgaggggagagagccgtcggttcagcgcaagatggcaatgagcgaaaaaattcaggccccgagtgttagtgactgcataagcgagtggttagaaagtccccaggctaaaaagctggttaagtatgattactggataaggatgtttgacctgcatgtcacgccatatgttggaagaatgacggtcgatgagatgcagatagcacactgggaatcagtctttaagcgaatgagggaaaatggcgcaccggtgatggctggcatgatgctggtcaagatgaaacagatttttaactattcgttacggcgtaaccgaatcatccggaacgtcctgactccattgtcagtcgccgatgttggcgatccaatccgaactattgaccgattccttaacgataaggagataggactattctggcttgctgtcgattcatccaagctcgcataccagaataagctatttataaaattagttttgcttactggctgtcgcggtatagagctgcgcatggctaaaaagcaggattttgatttggatagaaagacgtgggcaatacgggaggagttatctaaaacccggcgccggttcgtgagggggctttctgacgccgcagtgaccatgctaagagaagcgtttgatatttatcctaagctgggccaggtattcccgccggcaacgattcagaccgacaggccgatgtccgcaggggttcttttatcgatggccgatcaggtaggcagggtgatgggcgtgactgattgggcaatgcatgatctgcgcagaaccgtaaagacaaaaatggcagaactcggcattgcaccgcatgtatcagaaaagatacttgggcataaaatggcgggtatgctcgcggtatatgaccaccatgattacatacgcgagcagatagaggcggcagatttgtgggcgtctaagattcaaacgtgtgtcgatgaaatcagccccatgtcctgacagaatttaatcacgtcctggtatcggaatagtgcgccacctttaggggctgacaactcctttacctcgggtgggaatggcgtattttgttgtttccattctttgcggcgatggtaaaaggtcgttctcgatatcccgccgagcatttgctggatagccgttctgtttatcagaacaggaggaacatcgatttttatatcattcattgttggcctcttatttctttgtcgatctgcctgacgaaatagctcaaccaccgcttagccgaaaacgagttaggcggtagggcggttattttttttgcgtagcgatcgaggattttcgtaacgatggggtcgtgctgagttttaggtataccggcggtggaattaatgatttctgttctgcactgccgggcaaccgatctgatggcattttcgattgttgcttccaaacattcactccttccagcagaacagccaccagtaggcgatgatgccgccgataaagagcagcacccaatcaaggtgaattattagttcgctcatattccttcagctctccccggtatcagttgaatagacttaccgcactcattgccccaagtatcccacccgtgcaactccttccttgaaaataactcgatgcgcttcacatccccataaagcatttccagccggtttcgaacttcccacggcttttcgctgtggtgaccaagcggcgagtaaactacttgcttaatactggcgttcagccgctccagcccccgcccgcgcacggcgattaacacatcttccgtgttggctctcgtgtagttaccgccattcatccgtgactggtcattcagtagggtgaggaaatcgtaaaaatcctgcacctcaccggcggccagagccttgttaatgtgctcttcggccagttggtttagctttacccaggtgaaccccttcatcgtgcgcacctggaaaccccaggattcggcgacttcctgagcctcttggttgaaatttcccgtgtaccacatggctagcacagcatccggtgctgacatcgaccagacaggcaagcgtttcagctctgctaacgtcatcgttccatagtgattatttgccgccccgttgctggccttgttgctgtactgccacggcgggtcgcaatagataagctggtagtcactcatgccgcctctcttaacgctttcagatgcggcgcattagcctggaaaactgcctcggcgaaaccacgaggtgtagcgcttcgcaaattagccctattctcactcggagccattttatgaatacggtcatctggaacccctacaccaaccgccttgaattcatttggcatgacaaatcccccaccagtccataggcatgttttctttgtataattgtcatcaggctcgtaaccagtaaattgatgagggtgaaagaagaaatcaggttttcgccagaaagagcttatttggcttactgggttttcaatcatgtatggaacacgaagcatttcgctaatgacatgacactgccaaacaacttgcattgctttaaactgaaatgctgggtcaatcgttctttttgaatcaaaccatctcgcaccgcttacagctaaatcagtgcacggtggaaatgcggctacaaataccgggttatgtattgagcgcaataaatcccatacgatcggggtatcaattacattcccaactcgggttattgatttggaagtgctaatcccgctggggtgctgtgggtcaattaagattgcatcatacccagctgctatccacggggaagccataatcccggttaggtcgcacaggcaaataatcacgcctttattcatgccgcattccttttccgccgttcgtcaatctcatggtcatcccggcagtcagcatcacagaacaacccgcgagtaattgcccggcggcactcataaaagtggcagcgcccggtgaatgtcatttttggctttggccggttggctattgcggtgtcgatgttgtgctgttcgagagctgaagcgttatcgatatcgtcgggcattaggccacctctgcaatttggtatgggatcatgctaatcagcacgtatcccggctttatatcgccgatgtcggcaacgtgtgttatttggcgattaacgaagcttccggtgtagttaccggcgtcgaattcacgcagcgttagcgtgtcacccacctggtaattacggtcattgagccttatctcggcagtcttaattccctggtatacaggcgcaaagaattccggtctgattttcagtccgtgagttttcataggggatactccagatttggtgaaatccgtttccgtgagtccgtaatttatggggtattaattggatgttttaatttgggtgttaattgaatggatgtgttctaaaaccgcattatctacctggtcgtctgttactaaaggtgaccacctagctatgtaatattcctccgatcctatgctgtattcttctacaggcataaattgatgtttaactttttcatcttttctcgtgtggttaactccgatcagaacagttcctctaggcgctgtaatgatatcggttttgccatctggttttattattacgactttacattaggcatatatcctcctttgtcaggagaattatagacccgctatcggcgtacttcgccacagatcagcactaccgccgggcggcgttctttaatcagtgcggacacgttctggcattctgtctgggtagggtagatgttttctgaaactggcagcgcttcgcaggcgtcaaggccgcaggaactgacaagtaggacaaagccgattagcatatttcctcaccttctaaccgtgtattcaatgccacgcaaggctagcgccgccatggttttttcgagtgatatcatggggccatagtcatcataattcgctggcgctggaagtgttactgaatctgctggcttggccgctgtgaataacaaggtacctaccggcgcgtcattaatccaaccgagggttttattgccgttacagctaatgacttggcctataggtttctgctgtttcagctctgcaagttgctcacgcagtgatagcagttcttctaatgcctccgcatcattgagtgccacctgactatgttcaactgacgaccatttcatttcgctagctatttttcgaatttctgcaattcgtttttccagctgttctttactcagcatctgcattcccctctaccgtgaaaccggctgcctctatcgcatcaaatgtttttgaccaactgataacattacatcttgatgattttaaatatattttctttggcaatacaaccggcttgcttagcttctcgtttgccgctgataacgctgcttcacttgcaatcaattcgatgcgaaacttctcgctcacgatgtagtgaagattgcgatcacgctgagccgcttccagctgggctatcagtgcgtctaaatctggcattggtacggttaactggtcagatccgtatgacttggctatttcaaacttacttttaaggcgagcaattctcaattcttcgatattcctatccatcatgcctcctgcttgcgacgtgagcctttgtattcaggctttggctcatgctgtggtttgcagattgtgtgttttaaaatctcaatccaattttttctagaattaatcacccatcccccgccttcagtatcgaaaaaattttcatccacagggacggcaagacgctccagcaattcacacggaacggcaatagtgtcgcatcctgagttgtaatatctgatttaagataaaatcttgtcctcttcataacgcccagcagactctattttccctctatatccagcgttgttttccgcccacaaaagtatgtagcggctatggcgcatagtgtgatttacgctgatgacaaaatattccttcgccatatcagtcacctcaaaacgaatcgataatcagataagcaatacccgcacaacagatagcgagtatcaccgacaatattaaaagccactcggatggagtgactcggtattggagtgccttgttaatggcttctcgaatttttgacacaactattcctcagcagacygrctgccggttaagtggaggggtaagggatttaagccaccagtccgttagcagcgactgatagcttcaagcatgagttgaaccgctccgcaatcaattgcgctttaaatgggttccgttcaatgcggttcttcggggtaatccatccatgatgtattcgggrataaggtagcgtcaccgcgcctaccgtgatgtttccatgcggattatccatatatctgttaccccacggattcttccatctcagcttttctgatgctgtaaatgtcgatcgccttttccagctggtcggggtggctagcgaggacacgctggctgtatttgaagaatttctccagatctgcaactgactttgcgttgctggctgcgttggtgaagtcagcaagcagggcatcaggtgagcgctcatctacttttgtcgtctccagttcgccctcgattggctccgctttcttggtgttgatcatcttgttcaggtcggcattggtgcgcggggttacatctcgctcaggctttggttttccgtccaattcatcagtggagtaaacgccgagaataacctcggggcagtagaggcgagaccagcgcttaacggctagataggccaattgttgcttagggtcgcttgcccacagggtggagtttctcacctgagcctgagacagaagaagctcaagaacgcgcggttcatcctcccccttcatcgtcgcccacactcgaatccctaagcctttctcgtctgccagagtccagtctggtgctatgtatttattgccgttctttgaaactttttctgcgaacttgccgatcacgttttcccatgggccaaaccattcataatgaatccggtcttttgtaggtgccattgcgtaaattaccgcgttgaccagttgcgcctcataccccagcgttccgctgacgacgtgggttttctgggcaacaacaaacgggttcataccccattgaacggcttgcattgcaacagccatgcaatcagctttgttaccggcaagatgcgatgggattgttgaccggccacttgccattagcgttgcaaaattttggatggccatcagattttgagggctaaaaatagccacgttcgcattggtgatagctggctcattgctgagttcgatgttggcgatgtcagtcattgttctttttccttgcccatgccgggcggtaaatggtttctacaccgccccattcgttggtgagtcggcattcgtgataggtttgcaggttctttctgtaaaggtcatgcccagcggctacatcgtcagcatcgagctgaaatacgcgggtggggtatcgaccacagttaatggtttcgcttactgcgataaacagaaatgtcgggtattcgttgaagtgattgagatagccgtcccggtacatagcgtcctgcacgtgataccggaactcttcgatgtgtcgcgagaagcgatccatgtcagccacttttttcacatccactatgattggctgactggtgagaaacttgtccggtcggatccggcatagttctgatgtttcttcatccgtccaatagattgaagattcgcagtatccttctgcttctaaaaagtatctggccgccgggtgggccattgcactcccttgcatcagttccagcttccggtgctgttcaaagtccattacggtcttccctgactcttcgcactctttcagaaagtccttttctgctgccttaccatccgttgtgcgccggttaaactctggcgctttgatgaatcgcttatcgaactcatcaggttcaagtagcaggcagtggagtgctgtccccatatccagcgcctttagcttttccgtatctacaggcgctgttttcttccatgtaagtattgcggggttaatagccacatcatccagttgcgacttacttacccccggacccgagtgataatcctcgtttgatatatcttgatagtggcccggttccatcatgccgcctcatcatgctcagccagtcgccgctgtattcccagcgcctgttgccatttggcattctcaaataggacgttgtagagtgcggtgtcgagcccctcgaagtcgtactcatcaactaaaatattgaaagcttcacggtcgaattcagggaggtgttcaaaggttttaattaggttatgaacccgcagtgccttttcctgcctctctgcgacttgtccagcttgttctaaatcttgctcgttcaatgagctataaagcttccttgcttcggtaatgtcggtaggtgtcatagcggattacctttctgttgaaatatgctgagaaaccagcggatccacggattggtgttttttacttttggctgatgttggcaatagcgacccatgacggcatcgccagttagtacgaattggtacatgagtggctcctgaaatttaagtttgattagtaagtgatacgaactgaggaaatgaggttcttagcgatagcggctacacatttctgtgcgcaatcttctggcaatccgtttgcaattaagtcggctactgcttggcggttgatggtgcgacggtgttcaacgtcagccgcgcgcttggctgcttcatcagcaacacgtttctcttcagctaaccgggcatcttctttctgcttggcttcacgttgaactcgctcagcttcctgctgtgctttaagtttctcggctgcgatagcttcctgcttctcgcgctcgacgcgttcagctaattccttggcatcacgctcagctttggctgcggcatccttggcggcctgttctgctcgttcctgagctagttttgcatcacgttcacgttgttccgctgcttcaatgtcacgcttggctttctcttcagcttcacgcttcgatttctctgctgcctgttgagcaatgaattcttcatgtgctttccgcaggcgctcaacttcatcagctttcgctttggcgtcacggtcgaaagcgtcattcatcagcagggccatctcatggtcagactctttcttggctgcccgttctgctgtaatgctggcgtccatttcatgggcttcctgccacatggccgagtaagcttcttcggctgcgacacgttcctgttcggcctcccaatcagtaaccggctttcggattgctactgcaatattatccagttcgtcacgaaacttttttctgttggcatctatcagagcaggccgtgcttttagctcagcaactaactctttggcgcgaacctcaaatgctgctttagatttacgcactttgtcagccatcgtgtataaacgccgcgaccctttgccgtattcaggtcgccaaccactgaaccggctgtcttgcgaacgttatcaatcagctcatcaatgaatttgtcattcagtaacgcaacttccaaatctactttttcagctggcaaggtgacgagcgccagttcctttttttcatcactcatgctcatttccttataagtttgcttcgtaaaaagacttaatggcggattcgaactttttgaagtcaaatgacccagcgtcaccagccgaatcggattcaatccaaattattccgtctgcataatttgatattgtgaagtcgccgattttcaccgctttggactttccgctatcaactgaggggtttgtgtctgtgttggtaaataaaatacccatgctcatttccttgtgtttagcccacagcaaaacaccgacgatgatgtcagttatttactctggggattggtggggggggttattctggtatagattcagggactgttggcttttcaaactctccccatgctagcagaacacgctcaggtagtttgtcagtccaattgctagttgtttggtatttgccatcagcgcctaacttgaactcttcgaaatacattcgaccttcatctgggtactgagcgtagtagccagtgaatccaataaactcgccatcttcgttagtccagtcatctaagccgctaggggtgccaggtggaaaatcaccattctcttcaaaagaaagcagttcttcatgggttgcttcggcgttcaaataattcaactcaactactcggcgattaacctcttttaatgttgctattcgctctgcttttccatctataccaaggccgccatatttaatttcatactggtagatatcaacaacggcccatatttttatatcgcctccacgctttacaactggaagttcagatggatttttccaaattacctctttcatatctcacctatttagttggaggggttattccgcttctacaaactcgccattctcattcagcgaataccaaacatccggcttaattccgttctcgcctactttactggcacggatatgaattagttcgccttcgccatttcggtagcacaggacgattgcgccgctttctgacgctttagcctttccaccatcaccgaatgaagccgctacagattgcgatccagacacctctgccgctgaccagtcgccagtgttggttgccgctgaccggttgccagtgttggttgccgctgactggtagccagtgttggttgccgctgaccggtagccagtgttggttgccgctgaccagttgccagtgttggttgccgctgactggtagccagtgttggttgccgctgaccagttgccagtgttggttgccgctgaccggtagccagtgttggttgccgctgaccggtcgccagtgttggttgccgctgactggtagccagtgttggttgccgctgaccggtagccagtgttggttgccgctgaccagtagccagtgttgattgccgctgactggttgccagtgttggttgccgctgaccggtcgccagtgttggttgccgctgactggtagccagtgttggttgccgctgaccagtcgccagtgttggttgccgctgactggtagccagtgttggttgccgctgaccagttgccagtgttggttgccgctgactggtttccggtcatgatctgctgttcaagcgacttatcaactttgctccagatccaatcaatcccgcgctgaataaactgagggagggttagttcttctgtgatggttatgctggcgcttgcgatttttgtatcgccatcatcttcgcggtcaataacaccaaatgattcagttactgcataccggctatttgttggcgggtaatatccgaaaacatcaaatgggcattcacaagcgtggaagccagagccgcatgcctcgaccttgccctcatgcgtatacgttttgccaatttcgaactggtagccacggcactgaagattttggtcgaagcctttaaaggtaataactgtttctttgctcatgctgcttccttgaatttttggaataaaaaagccgcattaagcagctcgttgtttgtttcagtggtcttattgctgccaccggttaagtggcaggggtaagatcactggggttccgagatgaaatctaatacttcctgtaaatcaccgtcacacagagctacatatccatccgcatgcattcgctgaagccattcaatgcttatgtttcgatattgactcatcattcattcctcatttaccagccaataaaaaaggccgcgttatgcagccttgaatcctgtaacctcaatccgacatatcggataggtataaagcttgttgtcctgaacaatcttctgcgcagcttccatgctgtcagcgctgtcacagaacttaatgttctcgtaatacgcgccgtcgtcgttatccggcttgccagccagaacagtgaaagaaagtgtcattctcttaccccttaactatgtggtgggcttctttgcggttggtgcgatgaccaataaatagttgcctgaactatctttaaccacgtcaggcggcggtggttctgctatacccctacagcaagaaatcgaataaactgtaatcacccctacagttagagaattattcaaatggacgttttttctagtttgactgcagcaaagcaagcttttgatttattgaagataataaaagaaagtcgtgatgaattagttatcaggaaagcagcaggtgatctttcagaaaaaattactgagttacagatgcttaatgcggaactctctggcctttatcaggctgagcgatacatcacaggacagcttcgcgaagaaaataacaaaatcgagatgtttattgtgcaggccgagaactacgaacttcacaaaacggaaggtggatctgtcgtgtacagatctaagtcttcttccgatgacgttattgagcctcatgacctttgtgcacactgcttcggcgatcaccagatatctatacttcagcctagcattcaaacagttaagtccaataatttctttgttcatcagtgcccccgatgccaaaatgaataccgcatgaataaagtaccaccgctccctgatgtacatatcccacacagcatgaagcgctactaaaatcactaccgcgccgtaacgctctcactcttacggaagcctgctgcaaacttagccacttcaggcaaacatatattgtccgcgcttggctgctcggcgctgcgaaccggtacaggaatcgttgctttgtatacccgagctgtgcagcctgtgagggctgtagcgatgttcttttctaaccgaccctctgctgcacatttagctctgtaacgagctgtgcgtcgctctctcgaattcatgattacctccggtgattggctttggtggtgccggtagttaccggatttccttgatgcttctaacagctatcgatttggcatcacgttcgcattgcgatccggtttgcttattcacaaggccgttgtcttaccagcaccgccaaagccaacttctctttggtgccctcgtatcagggcaatctaattgttaaagagcgtgcttcctgtcgtaccacttcggcgtcctgccgtgttgatgggataaataatcacagattgtgttttgatcgtcaacacgaattgtgtttaattggggcgcttaagtgtgatgttattgatttttaatgtaatttaatttgaaaataattcagacgtgacccttcgcacctggatatcaggcgtgaaaagtgtgaggtgagtagtgtttaaagcgggcagggtggtgagattgtcagattacaggcgcaaaaaacccggcagcggggccgggtttctaagcgacagcattttacttgatataatattttgacaaaaccgcaatcaaaacagctacaacaagagatccaataattttccaagtttgattattaagttctttatgtaactcagttttcactgattggatgtcttcttttgaagctagtttatctttgatgatggccacgtcagttacgagagtggcgactttggtttctaaatcttttactctttcaagcatgtcatcacctcctccattcccgctaccatgttgacgattatcgcccatatcctgatcatctgcaatgacaggggctctggttatgatgttgaccgcttcaaccatcagcgcgctccctgcgttttagatacaaaaaaataacactcagctgaatgcaatattttctcattttctatttggtctggggaggaatatatggaacaaaccaccttatgcgcgccttcatttttaacattcaatccaagaagagccatgctttctatgctcacataatcgtcagctgaaggggatgcggcaactaacggttcagccgataacttgtctttggtgtcattcataatactaatgtcttcatggaggacatctacaacaattttatatgttttataggatcttatgaataacccaaaaattattccaagattaattcttcctggaatatttgagactttaatccaaggttctggttgcctaaccaccctggctggatcaccctctctgatttcgtgggtgtaaataaatgatattttttccataaccagacctttatttatatttgctaaatctctatgggctagcagtgggtttacctaagcctcattatttttctgagtgcttttactgactcaattccgtcacgatagatagcgcttatatcatcatgctgttcaggccgttttatcctgtccctgcattgataatatctatcccacacagctttcaattctttgctctttttgttagttactctacgggatagcatttctatgttttggtaaggcagcgggtcgacgcttagcgaatcattgccctcccatatgctttgtatcaactccaattcggctaaaatcggttccgcaatagcattccattctttgcgattatcgttcctcacggcagccttgtagccaaaatagtatgttgcaggtaatgcaacgactgatataattattgcaatagttgcaaccgcatcactgtatgtcatggagatatccctatgtctttctcaggttccgatattcttgccactgtcgcattaattgcttcggttactaacctaacggtcgtcttgtttatgtgctggcgtgcccgaaattggtagggctagcagtgggttagggtattagactaaccgcattttggtttcgacagctacgccaatgattttgcaattcccattaatcggcacaagaggccatgcggggttaagaccacgcaaatatttagctccgccgtcaatgatcagttttttaaatgtagcttcgttagctgtttccagcttcgcaataactagactgccgtttcttgcttctcttccagtatcgaaaagaacgagtgtatcttcaggaatgctaagcccagtaggggctgtcatcgagtcaccctcaacacgcaaccaaaagccattaccttcaattctcgcgtctgactgaaaccactcatcgatatcttttagtgcgtagggttcaatagcttcgcaccatgccccggcactaacccaactgattagtggatatttctcccccttgatattagggccaacgtaagaaaaatttgatggctcctgatcgccaaaaagaatttgagatgccgaaacccccaaaaccttagcgattgtttctgcatcgctagtgcttaattttctagcgccagattcataattcccaattcttgactgtgatttccatccgcacaggcttgccaaggccccttgggtaaggcctttattttctctaaggcttttcagcctttttgcaatttcatcattcgtattcatgcacatctatttaccacaatccgtgttaattggctttcacgatttgtgttgaaattaaaacacaaaacgtgtttaattgaggttgagtgaatcattaaggaaaaccaaatgaatcaaattgccacagtacggaaaaaacttggcgtcactcagtcagttcttgcaaacacctgcggttggaaacagtcacgagttgccaactatgaatcaggtatccgagttcctgatcttgagtcatgtcgtcgaatagtaatggcgcttaatgagttgggaagcaacgacacattagatgaaattttcccgccaaaagctgcatagaaacaccgctctttacacaacttaaccgccctgactcgagggcaccaacaaagtggtcaatcccacggactgactacgcacttaatcagaaagggaagtattacgcatggaacgtgcaagcacacgcaacaaggctcgaatcattgagagccaactactgaacaagattgcattacgaggcgtcactgatattgctgacgctgttggcgttgataagtcacagatatcacgctggaaagaaagcttcattccgaagatatcaatgcttctggctgttttggagtggggagtggtcgatgacgagatggcaaggctggctaagtcagtggcgttgctgctcgcaaaacaaaaatccccggcggccaccagggattcagcagagcagataacaatgtcgttttaactggacaaaacaacaggagtaattatgcgaaagaaaaaaccaaatagcaatacgtcagacgctactcaatatcaacgggcggcaaagcctgatgagcttctcatggtctgcaatgacaaccacgtttttggccgcaagtttgcagagatattccgcggcatagaagcgagaagagggaaggccaatgagtaacgtcttagcgtttcgtcaaccagacacagcaaggccggaggcaaccggtaaggggtttgccttgatgcatagaaaaataatggaactgcccttctacaggacggattctgaggcagttcacctgtggatacatttcatacttaccgctaatcacgcaccggcaatagttaatactgagctgggtgatgtcatggttcgtcgtggagagtttatgactggcagaaataagctggaactggcaaccggtattaccggtaaccgcattaaatatctcatcggtaagtttgaaaaacttgggatgatcaccaagtcaaccaccaagaaattctcattaatttacgtcacaaaatacgacgaatatcagccaaatttagtgccaacagattaccaacaaagtgccaacgcaaagccgcttacgccaagcgctggcgcggaggttgtgccaacagattaccaacaaagtgccacaaacaatgaaataactaataactctattactaacgtaatagagagtccctcttcagccgataaaccggaaaagaaaaaaccgtcattcagttgtgaagatgtggtcaatgcttatcacgacattctgccagaagccaaaggcataagagcactcagtgacaagcgacgcaacctgatcaaaaccttctgggtgaaagccagcaagataactcgccaactggacagccagccattcacgctggaaagctggaaagcctacctgacttacatttccaccaattgccgctggatgctggaagaccgccctgatactcgctccggaaagacgtggcagaaaaaagggttggagtatttcctgaacgatgaaacttatcttcaagtccgagagggggccaaggatgaccgttgattacaaaacaccaccacacaacctcgacgcagaacagagtgttcttggcggcctgatgctggatgacggcagtgataacgttgctaaagtcctgtccatgctgaaacccgaatcgttttacacccgcccgcaccaagttattttttctgaaattaaagacttggttagcaggcagatccctattgaccttctgacactattcaaccagatggagaacaaggggattagcagcactgtaggtggttttgcttacatggcagagctatcgaagaacacccccagcgccgcgaatatcgtgcattacgcgatggaagtacgcgataaggcgatcactcgttacagcattgccaaaacaaatgcgatgaccgagttgctttatgccaacaacggtatgacggcgacccaaaagcttgaggcgatacaggcgctatctaccgagatcacagatcacgccaagacaggtaaccgcagaggactgcgaacattcgagagtgtgttctcagattgggttgatgttgtcgaacaacgactttccggtgacccgcgagctgttgggttaaccagcgggatcgcatcactggacgccatgctggaacctaagcgaattgtgaaagggtcactgttcgtggttggtgcccgccccaaaatgggtaagacaacgctctattcaaacatggctatcaactgcgcactgaatgagaatctcccggcgctggcgtttagccttgaaatgcctgatgtgcagcttggcgaaggcatgatttcccaagcctcaggagtatccagcagtaatttttatcttgatgggtacgacgataaccgttttgcgttggcgtctgcgaaagggttagagctggcgagaagtggcaatctgtacatcgacgatacgccgggactttcactgtctcacatcgtttctgagtgccgccgcatcaagcgcgaacgtggtgttgtaggcatggtattagttgactacctcacactgatgtcagccgaaaaagcagaccgtaatgatctggcttacgggatgatcaccaaggggctaaagaacctcgccaaagaacttgattgcgttgtcgttctgctgactcagctaaaccgtgatttagaaaggcgcgtcaataagcggcctcaaccaagcgactcccgcgacacaggacagattgagcaagactgtgattactggctgggaatataccgcgaaggtgcttacgacgaaaacgccaatcagcaggacaccgaattactactccggcttaaccggcacggcagcggcggggtggtattcgtcgagcaacgtcatggcgcaatctatgactgcaaccaggatcaggctaaagcaaaggcggctgaatctgagcgccggtcaactaaaaaacaaggtggtttctaatggaactgactcgcgaagatgaattaaccattgagcaatatattcgccttgctcacaacggctacaccggcccggtatttatctggcttgaccggctgaaggagcttcacatgaaacgcgcacaactgattgcctggactgctatcacctgcgccagatacgaatcgaagagggctgcatgatggacataactaaatcgcgggaagagtttgaagcttggcttaaatcgaaaatcccaacgacttaccgccttgcatttgagtgtggcgacgatggcgagttaaccaacttagctaaagcgtcagtgttagatatgcggacagcgtggcaagcgtcgcgagaaagcattgaggtggagtttccagaccagcgagatgaaaacttcgacactgataccgcctacaacgaagggttgagtgccaccgccaacgccctccgaactgctggcattcgaatcaagggagagagtgaatgaaaacaacggaagccgtaatgtgcgtagcatgcagatatcaccacttgaagctagagagggttgtcatgagtgatgagtcttctggcaccaaaagaaaatgctgcccaaagtgtggctgtggcgggtttattaacgttgaggtaaagccatgaaagaattagatagatttacatctgagagactagaaagcctttgcgattatcgaccaaacagagtcactaatctgattaatttcagggaaatcgcagcactagcccgcatcgcgttagctgcaaagagggctgagcctgttggttatttagagcaaaaccatttggattatcttcgatccggttctgatgctgatatttggcctgagggcggtgcaggtgatatccctgtctatctcgccccacagttgaactctccggtaattccggaaggttggaaactattaccgaaagaggcaactttagccatgctcacgctattgggattaacaggcagctttgaaagtatgcaagagcgctatgccaatatgctagccgccgcaccggagaagccactatgacaaagcatacctatctactccgaaatacccaggtacgtgacaacgccatagcagcgatccgcagtgtgccgcttgatgagaaaaagccgattgaggttctcattcaggagaagaaacgcagcaatgaccagaatcggaaaatgtggccacttttgcacgacctatcaaaacaggttctctggttcggtgagaagtacgatgaagctgactggaaagacctgattactgcgatggtggctaaggccaaaaatcaggatcagcgtacggctcctggaatcggcggcggggtggtgatgttcggccagcgtactagcaagatgcgagtgagtgagatggtggaggttatcgaggctatctactggttcggcactgagcagggcgtgatattcagcgatgcatccaagctggaaatcgagtgggctaaccggtggggaaatacaccatgcgacaaaggcaaagcagcatagttttcgccctagacaatcttatcttccgcaagacatcccgaaccaaacctaaacccccaatccccgccagcgaaatacccacatatgacgctatctatccgttattagctaaacgctggctaagactcaggagtagaaagaatgcctgatatttaccaaaagattaacggggccgattaccgacgaatatttgtcgttggtgatatccacggctgcctgaataagctcgatgagaaattactctcagtagatttcgatgagagcaaagacttgctgatatccgtaggcgacctgattgaccgaggttcacagaacgtcgaatgcctcgacctgataacgcagccttggtttcgtgcggttcgtggcaatcatgagcaaatggcgattgatgcactggatggaaaatatggaatggctgaatgctgggtagctaacggcggaatgtggtttttctgtctcgaccccgaccaaaaactattggcaaccagcttaattaatcaggccgctgcgctgccgctggtgatcgaagtgacaactgacagcggtaaatatgtagtggcccacgccgactaccctggcaatgaatattattacggaaagccggttagtgaggagcttgttatttggaatcgggatcgcgtgggtgacgctatggatggtttaggtgcagaaataactggggcaaagcagtttatcttcggccatacgccaatgagtaaacccagccaatttaaaaaccaattctatatcgacactggtgcggtatttgggcgtgagttaacagttatccagattcaaggggagcaggcatgactcagttaccgcaatccgtatgcgtgtattgcttcttgatgcttaacaagggtgaaacctacgcccaaaaagaagcggctaagcgagatgtcggcactgggattaatcagataccggatatgtggagttttaccagctcaatgacctcaacaggctggatgaagcgacccgatggtttaattgaacaatggggagaatcatccttttccagatcaaatgaccagtttttttatgctgacgcttttttcccaatagcgttccccaataaagttttaaatatgagtgtgacactccacggcatcaccgatatttcgataataggaaaaacgctcgctgcggatatgttagcaagaacatgggcagcgatcccactgagcaagaaaagcggggaaaacatccctacagcgcaaagagttatgtggcgcgttattggttattaagtgaggtttaaatgaattatttctacagcccagcgaataatgccgcttatccagaatcgttaaaaacggaatatcaggctgcgcaaagttggccggaggatgccgttaaaataacggacgagacttatcagacgttttttgcctgtgcttcgccagccggtaaaaccagaatagccggaaagcaaggccagccagtttgggaggatattcccgtttatgtccctaccgatgatgaattggccgcccgtgctcgccgctatcgcgatgctttcattcaagccaccgatcccatgatggtcagtgattattctattgacgacgtaccgctgacggaagagcagcgcagcgagctaatcgccactcgtttagcgttcaaacagtggccgacgctggcgagctggccgctgattgagttgccagtgattgccgggctggataaatcccgctggctactgacggaagcggtgaataatggctacgtggtgccggtgtggccgccagaatttcgttaaatctttataggccgcatcgttcgtggcctataaaaaatcactcaggctttagtggccactcgatatttggcgcagttgaaacgtcaacacgcatcagcaaaactcgatattttctccactctgtgaggtcagccttttctttttctgtcgcatctcccatatcaacagcatcctgccgccaggcaatttcagaatcagccgcctcccttaatgccttttttttctggacagcgcgatatatcaattcttcaggtgaaggcggtggtatatcaacccatactggccgtccatttaatgaccctatggtcttcctatctggtggagtagttttccagtattcattagattcctcatcagaaagtaaaacagcatcacttggccaggttttcttgttatatgtaccatcatctttccatgctgcaggtatgaatccatttaaattagcgctgtaatataccattgcatttccctcaatatccgatagcaaaaacaagtggattagctgttccaggaactgacccagaaccaaatacttgtgagaatagggtaatagaatttaagttggttgatgtcacttgaaacatttggtcgcatgaccccgtaccattccccagagtggacacgctggagaacacgcaagcagttgggaatgctatagggaacgagagtggacccatggtgctctcaccagtagaggatgggccagcaaaccattgaatgatcaatccaccaggaacatcaggtatgcgaatataatctctggtggttactgttttcggctgttgtgctgagatttgtttccattctgaccatgggcccgccccattccactcagcggtcagaccacggacaaacttcagtcctgagtacgtcgtatactcttgctggcatccataagctgattgcgtgacaagcagtgttccacttgtatttgccgggtagtgcctaccaggagttgcttgagaatcgacggattgataccaaacacccacgcttgacgtaatattaccaaaaccatttaaatctgaagtacccaaagaccctttaatagggaatccactaagatttgacagcgccaaagatggatttgcaatatccgagagattactgattttggcaagaccaccaatatttgtcagggacaaagatggatttgtaacatcagagagattactgattttagcaagagaaccaatgtcattggaggttggtttgttattgggcccgtaaaactcaacccatgatgcccatggccctgatccagtccatgcactagataatccacgaacaaatttacgaccagagtaggctgtatactcttgctggcatccataagctgattgcgtgacaagcagtgttccagatgattgaatcggataattcgccgccgaggttgccaatatgtcggtgggttggtaccacacacccgcagaggttgccctatcacccagcgcatttaaattaattgtcccaagatctcctttagatgcaaacccaccaatatttgatagggactttgaggcattagtaacatcagaaaggttggcgcttttcttcagggcatcagcagcggcggcaatgacttcgccccggcgagctattccctacacaacagcacccgaccaaatgccggggaagattttccccaaacggggggtgggtcatgaaaatgttgaaatcaccggatgtatggatgctcatcattgcctggatagcagaccaccggggtgagttacttagcgcggcactggctgcgttgatggcttacttgcgtggctggtatgccggaggaggtaaaacgcaacgtatgcttgatgcggccatgtgctcagtgatggcatggtttatcaaagatgtattggttatagccgggctgaaccctgactggtcattaattgccagcgtgttcattgggtacatgggtacggattacattggttcggtgctaaagcgcatcgttggcaataagacaggggctgacaatgcaaatcagtagcaccggaatcaatctaataaaacaattcgaaggctgcaaattgacggcatatccagaccctggcaccggcggcgctccctggacaattggttacggctggactcatccagtagatggtaagcccgtggttcgcggcatgactatcgatcagcctaccgccgaccggttgctgaaatgcggagttgtccagttcgagcagggcgttaaccagatgctcaaaatcggcgtaacccagaatcaattcgacgccttggtatcgctggcctacaacatcggaacccgagcgctcagcacatcgacgctgatgaaaaaggtaaacgcgggtgatgcaaagggcgctgcggatgaattcctgaaatggaataaagcaggtgggaaagaaatgaaaggcctgactaatcgccgggcggctgagcgtgagcttttcctgtcatgagtcgcgtaacggcaatactcatcgctgtaacggtggctctgctattcggcctgatgtattaccacgggcaagtaaccaggctacagcgcgacgtctctgacattacccagatagccaacagcagacagtcagccattgacacgatgctaattcagcgccagcaggttgctgctatcgatatcaaatacaccaaggaactggcagatgccaaatctgagaacgagcgccttcgtgctgatatcgctactggtgctaagcggttgcagctcaacgccagctgtaagcgattgcccgaagccacagccacctccagcagcgttgatgatgccagcgccagacttactaacgccgctgaacgggattatctcagtctccgcgagcgaatcggaattgcaaccagccaaataaacggcttgcaggcgtatatcaataacgtttgtcttgcgaggtaagagaaggtggggacagcatccccgctgaattaatcacccaactttgcggtaagggtagccagcttttttgatatgcgcatcaaaatactgccccttagacggtgcgttcattaatgacgtgtgaatggaggccgggactctcgaatattgataaataccgcctcctagaaaagcaatttccaaagtggaacttgcactatcgtaaccaactgaatgaaggtttgaagatgaaacaggttgacgaatcaattgataaatctcctttaagtggcaaaagtgccaaagagatgatcgaacactttaagaaatataacttcgtggatgatcacggacacaggctagacatgtgcttggacttcacagatttgattgaaatggccgtttcgtaggcttgttaggcaaaaaaacacaaaaggctcgacttaggtcgggctttttttatgcagtaaatccagcgcatcgcagcgcaaatcactcagaacctttcaggatgacccttgaggaaccggctggctgtcggagccttctgagggccgtattcctgtgcgaacaaggttcatcactaaaaggtatatccgaatgaacattatccctcttagctataaaggcgaatcagtacgctttaacactgaaggttgggtaaacgtcactgacgttgctgagaaatttggtaagcgcatcgacaactggatgaggctgatttgaaacgcttgaatacatccgggcgctggatgaggcaatgactggtgtggagtctgaaattctacatccctcgaaatgcaggtatgtaaaaaccagtaaggcgagaaaggatcgcggaggtggtacatggcttcatccaaagctatcggtcgcttttgcgcgttggtgcgatgctcggttcgctgtctggtgtgatttgcatatagatagcttgttgcgtggtgagctaacggagcagcaaaactatgaccaggcctgccgaattcgcgatgaccggaaatcaaaagcaagtggtggtgcacgagaaatggcacgttggcgctgggacaaacctgccctagaagcaaccgtggaattctggcaggagcaactgaagttaacgctcgatattgccagctaaaagaaaaactgagagccactttcacaacggctctccattaactaaaagcactcatatatcagataggcgatcccgaccaaagaggccatccctgtaaaggttagccccaatgccagggtggagtagctcactgttgcagccatgtaccaacttttaaatttagcccacatagtcatcatcctttttgttttgcaaaagaatgacagtcaaatcagagggatggaaattggttgtacagatcaataatcggctattgatcgtttaaaacgatcgttgaacaacgagacgggtcaactccgtcaagccgtagcaaggctgctatctcgctttattgcaggccacggattcaaatttgaagtaaggaaatgatggtgaccgataaaactgagtttgctcgcgtcgttccagaaataattcaagataaggccagcgattggctgcttgggaagcttgatgaagaacttgatgcgttaagagatttgggggcatcaggggtagacattactcaaattctacccggatccatcaggggggctaagtttagagccgaacttattagagaaacctttatcacgcagtattcagacgagaaataaccatggcaagcctgacacagaagcaagagacattctgtcaggcatacatcgaaacgggtaatgcttctgaggcatatcggacggcgtatgctgctgacaagatgaaacctgagaccattaaccggaaagctaaagagtcattagacaacggcaagatcacggcaaggattgccgaattgcagggtgagattaagcagcgccatcacgtcactgttgactctttgattagagaattggaagaggctcggaaatcagctttagcggctgagacgccacaatcatcagcagccgtagccgcaacaatgggcaaggccaagttgaccggcctggacaaagtgattgtcgagctgagtggcggagttaaggtcgagcacaaatctattaaggacatcttcgatggctaatccacatttcaagccattcgccgaaagcgctccatacaaaatagcttacggcggccgtggaagtgggaagtcatatttctttgcggaacttgccgtggaggttgcacgacgcattaacacggtaattttgtgtactcgcgagtttcagggttctattagcgactcagtccacaaattgctatgtgagactatcgatcgtctcggttattccacagaattcgaaatccagaaaaacacaatcattcacctagcaaccggtgctagcttcgtattctccggcattaaaaacaacgtcacaaaaataaaatccatacagggcgttggaatctgctgggtagaagaggccgaggcggtaacaaaagactcatgggatgtactgattccatccatacgaggcgacaaacactcagagatatgggtgagctttaacccgaagaacattcttgacgatacgtatcagcgcttcatcgtcaggcctcctgctggggcgattgttctgaaagccaattacaacgacaaccctcacttccatgactcaccgctccctgcgcaaatggctgaatgcaaagaacgtgattacgacctttacctgcacatttgggaaggtgagccggttgccgacagtgacttggcaattatcaagccatcgtggattgctgccgctatagatgcccataaactgattggcttcgccccttctggtcgtaagcgagtcggttttgacgtagcagatgaaggcgaggatagcaacgctacaacactggcccacggctctgttgtcatggactgccagcagtggaacaagggtgatgtaatcacatcatctgatcgcgtcaaaaactacgcagaaagcgtcacagcaagcgagattgtttacgactccattggcgtgggtgcaggcgtaaaagctcacctgaggcgcgtctgtgcgataccgtccagcggatttaacgcaggtgctgccgtattcaaaccagatgctaaatatgctgaaggcaagaccaataaagacatgttctccaatatcaaggctcaggcatggtggggagtccgtgatcgcttcttcaatacatggcgagtggttaagcacctcgaagccaaccccaacgacaaagaattcatcaaacaattttcagacgatcagctaatcagccttagctccggcattaaacaactggaatacctcaaggctgagctgtcacgcccatgggttgactacgacaataacggtcgcgtgaaggttgagagcaagaaagacatgaagaagcgtggcataccgtcaccaaatatggcggactcgctaatcatggcatttgctccggcgcacaaaccattcaacattcctgacgagatactgcaatgacaagaaagaaggctgtgcgaacagctcaagccgtgcaagcacctcggcgggaactggcgaagattacaaatgcgcatcttgatgcggcgtctgctgcgaatggcgagaagccatttgctgagtttaagcgttacgaaccgctaccaggtgtgattccagaagataaagaagaatccgctctagcgatggactccacgccttacgatgtcatcaacggcatgtttattggtggtgaatattctggctttcgtggctaccctattttggcggcaatgtctcagcaggttgagtatgcgaacatgcataccatcatggctgacgagatgacgcgaaactggattgaggtgaagagcaccaaagagggtgatcctgatatcgacctaatggataaggcgctgaccaaatacgacattaagcgcttgattcacgaagccgtaaggcaggactcagagtatggcgtggcacacatctttattgatgttggcgccgatgaccttgagaacgaaaaacccctatttctagacccgcgcaagataactaaaggctcacttaaaggctttcgttgcgtagaccctaattgggtttatccggcgatgtacaactcaaacaaaccgcttaggccagatttctacaaaccccaagcatggttcgtgatgggggatacggtgcatgagtctcgattcatcgatatcgttagccgcccagtgcccgacattctaaaaccatcatataacttcggcggtctttcgctgacgcagttaatggaggattacgttgttgactggcgagatgcgaagaagaacgtgataaagattcttcgaactcttcgaatgcgggcgctgaagacggatatggatgctaggttagaaatccctggtgaatttgataagcgcattaaaatgttcaccaagtatcaggataactttggtatatgggctctcgatactgaagaggatctgattcatatgcagacatcactgagtgagctgtcaagcatcctatcgaattaccaagagcaactctgcataccatcacgcaccaccaacctgaagatgtttggtaacgccccagcaggtttgaatgccagtggggatgctgagattgagacgtggcacgaaacgatatccggctcgcaagaactggactatcgcagagccattgagaacatcttcaagattatccagctttcagagtttggcgaactgaagcccgacatctacttcgagtttaaaccgcttgatgaggtcagcgatgatgaccgtgccaacaccaacaagactcgcgttgaaaccgtggttgctgctgctgatagcatgctgattaactctgaagaggcgcgagacgcactgaaaagcattgaaggtgcaggattcgaaaacctgaagggtgactatgaaccggaaaccgaagaagagtagaagccttcgggcggtcaactataacgccggtaatatcatttggtatcgcagagagttactggctgttatcagagaaatgaatgacgatgttaagaaacaaatcgtcccgatatttgaagataacccactggcgatggacgctaacccggttcaattgttgcgtagtgctttgcgtgctctgtctaggaagtgggtagagcgcttcattaagatggcgctacctactgccgaatcagtgacaaacaagactggcgaggctgttgaccgctcattacttgctgctgcccgtaaagactcaatgacaattaacatgcagtggactgaggctatgctcgaaaagcgagaggctatcatttcagagaatgtggcgttaatccgctccattcctgagaagtatttcactgaagtggaatcgatggtgtttcgctcagtagccaagggtggcgaccgcaaaggattggctgacgaaatggaagctaactttggcaagcgtcatggtattactcgcaggcgtgctgaattcattgcacgtgaccaggtacgcaaggctaccagcgcactatccaacgcaaggcaacaagcggcagggattaagcgaggcatctggttacacagtggcggcggtagcgaaccccgcaagaagcacgttcatgctaacgggaaggagttcgacctagataagggcctgccaatcggtgacaaagggcagcatgtgttgccgggtgaagagcctaattgcgggtgtgtatggaagccagtattgccattctgaaaatataaaacgaacaaggtcgcttaggcggccttttttattgcccgaaaaacaggaaagaacatgaaagatgtgaagtttgccttcgataaggcgagcgttcgtcgctatgacgttgacgggatgcttcatgttgaactgacgcctatcagcaaggctaacgtctgcgtctactacggcaaagagatacccgattgggaagcgttaggccttaaccctgacaaggcataccggttgctacgtgaccctgaagaactcaggaaagccgctccaacattcaacaacaaaccagttctagacactcacatcgctgtgtcggtaattgacccgccaaaagaacacattattggttcgactggcactgacgcagtgtacgaagctccgtatctgaagaattcgatgggcatttacgacatcaattccattatcggcgtagagaacaaacagcagcgagaaatctcatcttcataccgttatcggctcgacatgacgccgggcgagtacgagggcgaaccatacgatggcgttatgcgtgacatcgtttgtaaccatgtggcaatcgtgccaagtggccgggctggcccggatgtatttgtatatgactcactacctacaggactcaaactgatgtcaaaaatcaaacaactcatgagcatcttcaagccgctgatggctaacgatgccgaccctgaagctgtaaagaaagcggaagaggacgtggaaaagctcatcaaagacgacgagaaagaccccaaaacagcgaaggacgagatgaccgacgaagaaaaagaaaagttagccaaagacgaagcggagcaggctgagaaagacaagttagccaaagatgaggctgatagagccgataaagagaagatggcaaatgacagtaaattagctatggattcagcgattaaagccgttgaagcccgcgcagccgcgcttcgtcaggcagaacatgatattcagccgatcaagcatcatgcgattattgacatagcaatattgcatctcgctaggcgttcgggcagcgctggggtcggccacccagccacgaatattcaaatcaccgtgctgccatgaaatcgccagcgcatgttgcaggaaggccgggccgcaaatactggccaaacgacgttcatgctgcgaaggatctggggccgctcgatattggcgaaccagcttgccgttgtgagtgaggtgaatcgccacgtcgaagcgcgccaacgcgatgcggcgtaccacttcatcaatatggccgaattcggttttttccgtgcgcataaatttacgccgcgctggcgtgttataaaacaaatccagcacttccagcgtactgcctaccggatgggcggcgggtttgatggtcaccgccatatcccgcccttcggcgtaagcctgccaggcttcgttctgttcggcggtacgcgaggtcagcatcaaacgggaaaccgagctaatactggccaacgcctcaccgcgaaagcccatgctgagaatggcctccagatcttccaacgaactgattttactggttgcatggcgcgctaacgccagcgataagtcgtctttagctatcccacagccgttatcacggatgcggattaattttgcgccacctttctcaatatcaatatcgattcgcgtggcaccagcatccagactgttttccaccaactcctttactaccgacgcaggccgctctaccacttcaccggcggcaatttggttggcgagttgtggcggtaatatctgaatcggcataacaaatcccttcggttaagactgtggaatggtgagcgtttggccgagttgtaccgaaccagacttcagcttattcacgcgttgaatctcactttgagatacaccatatttcgccgcaatagcggataaagtatccccgcgtttaacctgatgcttgatcggtttggccgggctgattttcttcaccgcaggcaccttggcgacgctagctaccgcgctgccagatgcgggaattcgcaggcgctgcccaacccataccacgtctttcttcagcgtattattctgccgcatcgccgccatactgacaccgtactggctggcaatgccggatagagtttcaccccgttttaccatgtgaatcagcgatttaccgctaatggtggctttccccccactgctgaccgcactgactaccgggccaggctgattaacaccactttgacgcgctgacctttcaaccgccgctgttgcgcccagcggacggttttcgacctttgggtcggcttgtagcggatgcgacaggaaataactgcgcaagcctttgtaaatcgcttgggcaattttatcctgatacgcactgctgccgagcagccgctcctccgtaccattactgataaagccggtttccactaataaagagggaatgtccggtgaacgcaacacgccaagactggcgtgttccggcctacgtttatgaatagaaccaatggcttgaagctcatgtagcacttttaccgctacgtcgtaacccacccgctgggagtgaccaaattgtaaatccagcaccgcctgactgagataaggatcggc

SEQ ID NO: 18 - DNA, 315 bp, Yersinia entomophaga
  source 1..315: mol_type = other DNA
atgacgttaaagattccgactgatacacaggcaattacctggttaattattggccttttttcagcttggggaggtgttgtgagatatctcatggatatgcaagggcacagggggagttggagttggatgggaataataagtcagatcattatttcaagcttcactggccttttggggggattactcagctttgaaaatggcagtagtcattacatgacttttgctattgcaggcttatttggcaccttggggagtacggcgttgagttacctgtggcggcgtttcttggggagtccggagaaaaatcgtgggtaa

SEQ ID NO: 19 - DNA, 390 bp, Yersinia entomophaga
  source 1..390: mol_type = other DNA
gtgggtaactttacttttagtcaaatcagtcaacgcaatctacaaggcatacacccggatctcgttcgggtggtgtacctggcactcaaattgtccgaggtggattttcgcgttatcgaagggctgcgtgatagcgcacgtcaacggcaaatggtgcttaatggcaagagccaaacgctcaatagccggcatcttaccggtcatgcggtcgatttggcgccttggttcaacaacacgattccctggaacgattggggagcgtttgctcaggttgcagcggcgatgaaacaggcggcgaagcaactacaaattcctgtgatctggggcggtgactggacgacgcttaaggatgggccgcactttgagttgccgaggatgcagtatccatga

SEQ ID NO: 20 - DNA, 402 bp, Yersinia entomophaga
  source 1..402: mol_type = other DNA
atgagtctgctcagtgttttgaaacgtggtctgctacttgccacgctatttgcggttttggttggcgggctgtgggttgctcaactgaaaaagaccgcgacattactgaattctgaaaatatcagtctgacgcagcagaatcagctttatctgcaacggttgcaaggatatgaccagcagatgaaaacactggatgaggcgttaaccactaatgccataactcagcgtcaggcagaggagaaatatcatgcgatcgaacaacaaatgcggcggctgctggctaatagccgctgcgctcgggagcctgtgcctgatgctgttatccggttgcagcaacgagcacttggccaaagcctgcccggtgcagccaatagtaccgaaagcgctgctattgccccatga

SEQ ID NO: 21 - DNA, 285 bp, Yersinia entomophaga
  source 1..285: mol_type = other DNA
atgcgatcgaacaacaaatgcggcggctgctggctaatagccgctgcgctcgggagcctgtgcctgatgctgttatccggttgcagcaacgagcacttggccaaagcctgcccggtgcagccaatagtaccgaaagcgctgctattgccccatgatcccccgttatttaacgtcacaaagtggggggactatcccggttatgtggaagaattaaatctatcgttggcgcgttgtaatgcagataaaacggcggtggcccaaataatgtctccccaaaaaggataa

SEQ ID NO: 22 - DNA, 417 bp, Yersinia entomophaga
  source 1..417: mol_type = other DNA
atgatgtattttgtagtggcagatgaaaagattgtgtatagcctgaaaggtagtgtagagttaacgaataaagagtatttattatttatcgcactggttaatcatgcgtcaaacggtcagctaatagatagggatgatttactcactttggtttggccagaaagagagatgacgataaacaataacaacatccatcaactattcagtcgattaaaaaagaaagtcgttctaattagtgatgattttgaattacaatctttgcgagggaaatcttacaaagtaaacaacaagaagaacatgtccgttcgttatattaatcacaactctatcttttacagatccatcaaggttatattttcactatataggaaaatttttagacgaaatacttttcgggataatgccgacacactttaa

SEQ ID NO: 23 - RNA, 417 nt, Yersinia entomophaga
  source 1..417: mol_type = mRNA
atgatgtattttgtagtggcagatgaaaagattgtgtatagcctgaaaggtagtgtagagttaacgaataaagagtatttattatttatcgcactggttaatcatgcgtcaaacggtcagctaatagatagggatgatttactcactttggtttggccagaaagagagatgacgataaacaataacaacatccatcaactattcagtcgattaaaaaagaaagtcgttctaattagtgatgattttgaattacaatctttgcgagggaaatcttacaaagtaaacaacaagaagaacatgtccgttcgttatattaatcacaactctatcttttacagatccatcaaggttatattttcactatataggaaaatttttagacgaaatacttttcgggataatgccgacacactttaa

SEQ ID NO: 24 - DNA, 204 bp, Yersinia entomophaga
  source 1..204: mol_type = other DNA
atgaccaaaactgactatctgatgcgtttaagaaaatgcacaacaattgacactttagaacgtgttattgaaaaaaatacgtatgaactatctgatgacgaactggaattattctactccgccgcagatcatcgcctggctgagctaactatgaataaactgtatgataagattcctatgggtgtttggaagtatgtaaggtaa

SEQ ID NO: 25 - RNA, 204 nt, Yersinia entomophaga
  source 1..204: mol_type = mRNA
atgaccaaaactgactatctgatgcgtttaagaaaatgcacaacaattgacactttagaacgtgttattgaaaaaaatacgtatgaactatctgatgacgaactggaattattctactccgccgcagatcatcgcctggctgagctaactatgaataaactgtatgataagattcctatgggtgtttggaagtatgtaaggtaa

SEQ ID NO: 26 - protein, 67 aa, Yersinia entomophaga
MTKTDYLMRLRKCTTIDTLERVIEKNTYELSDDELELFYSAADHRLAELTMNKLYDKIPMGVWKYVR

SEQ ID NO: 27 - DNA, 4119 bp, synthetic construct
  source 1..4119: mol_type = other DNA
atgtctaattctattgaagcgaaactacaggaagatctacgcgatgccttggtggattattatctgggacaaattgttcctaatagtaaagatttcaccaatctgaggagcaccattaagaacgttgatgatttatatgatcatttgttactggatacgcaagtgtcggctaaggtcattacttcacgtttatctctggtgacgcagtcggtacagcaatatatcaatcgaattgcacttaatcttgagcctggtttgtctattaaccagcaggaagccactgactgggaagagtttgccaaccgttatgggtattgggccgctaaccagcaactaagaatgttcccggagatttatgttgatcctactttacgtctgactaagacagagttcttctttcaattagaaagtgccttgaaccaagggaaattaaccgatgatgtcgcgcaaaaagccgtattaggttatctgaataattttgaagaagtcagtaatctggaaattattgctggttatcaggacggcatcgatattgagaacgataaaacctatttcgttgcccgaacccgaatgcaaccctaccgttatttctggcgatctctggatgccagtcagcgtaatgctaattcccaagagttgtatccaacggcatggagtgaatggaaggcgatatccgtaccattggaaaacgttgctaacgggattgttcggccgattatgatggataaccgcctttatattagttggtttgaggtggcggaagaaaaggagacggatagcgacggcaatattattgtatcgggacgttatcgcactaaaattcgtctggctcacttaggatttgacggtgtttggagttcgggaacaacgttaagagaagaagtgctggctgaccagatggaagaaatgatcgcggtggtcgatcgcatggaagatgagcctcgtctagcactggttgcatttaaagaaatgagtgaaagttgggacgtcgtatttagctatatctgcgatagtatgctgattgaatccagtaatttaccgactaccactcatccgccaaaaccaggagacggtgataaaggattgtctgatctggatgattacggtgctaatctggtttggttctatttacatgagactgccaatggaggcaaagcggagtacaagcagttaattctctatccggttattattaaccgggattggccaattgaattggataaaactcatcagggagactttggcactgtcgatgatttcacgctgaattctaattatactggcgatgaattaagcctgtatttgcaatcttcgtccacctataaatatgacttttctaaaagtaaaaatattatttatggcatctggaaggaagatgcaaataataatcgctgctggcttaactataaacttttaacgccagaagattacgagccgcaaattaatgctacgttggtaatgtgtgacaaaggtgacgtcaatatcattactggattcagtttgcctaatggcggtgttgatgcaggcggaaaaataaaagttactcttcgggttggtaaaaaactccgggataaattccagattaaacaatttagccaaactcagtatttgcagttccctgaggcgtccagtgctgacgtttggtatatcggaaagcagattaggttaaatacgctgtttgctaaagaacttataggtaaggcaagccgaagtctggatttggttttaagttgggaaacgcagaatagtcgtttagaagaagctattttaggtggcgcggctgaacttatcgatttagatggcgcaaacggcatttatttctgggagctatttttccatatgccatttatggtgtcctggcgctttaatgtggaacagcggtatgaagatgcgaaccgttgggttaaatatttgtttaatccgtttgagtgtgaagatgaaccggcattattgctaggcaaaccgccgtattggaatagtcgtccgttagtggatgaaccatttaagggttatagcttaacgcaacctagcgatcccgatgccattgctgccagcgatcctattcattaccgtaaagcggtctttaatttcctgaccaagaatattattgatcaaggcgatatggaatatcgcaaattgcagccgtcggccagaacgctggcgcgtctgagttattcaacggccagttcattattagggcgtcgtcctgacgtgcagctgactagtttctggcaaccgctcactcttgaggatgcgtcctataaaacggacagtgaaattcgtgctattgaaatgcaaagtcagccattaacatttgagcctgtcgtgcatgaccaaaccatgagcgccgtggataatgatatctttatgtatccaatgaataacgaattgaggggtttgtgggatcggattgaaaaccgtatttacaatttgcgccataacctgacgttggatggaaaagaaatcaatatggatctttatgattcaagtatttctccacgtggtttgatgaagcaacgttatcagcgggtcgttaccgctagaaacgccagtaagatgaacttcaaagtccctaactatcgttttgagccgatgttaaaccggtcaaaatcgggtgttgagactcttattcaattcggcagtactttattgagcctgttagaacgcaaagatagtttgagttttgacgcttaccaaatgattcagagtggcgacctttatcgcttctcgattgatttgcagcagcaggatattgatattaataaagccagtctggaagcattacaggtaagcaaacagtctgctcaggatcgttatgatcactttaaagaactgtatgacgagaatatctcttcgacggaacaaaaagttattgagttacagtcacaggctgccaattcgttgttgatggctcagggaatgagaacggctgccgccgctttagatgtgattccgaatatctatggtttggccgttggtggctctcactggggcgcaccgctgaatgctgcggctgaaattattatgattaagtatcaggcggacagcagtaaatctgaaagcttgagtgtttctgaatcctatcgtcgtcgccgtcaggaatgggagttgcagtataaacaggctgaatgggaagttaattctgttgagcagcagatcaatttgcagaatatgcaaattaaagcagctaataaacgtctggaacaggttgaagctcaacaacagcaggcaatggctctactggattatttctccgaacgctttacaaacgaaagtttatatacctggctgatcagtcaactctccagtttatatttacaagcgtacgatgcggtgctttcactttgtttatctgcagaagcttctttgctatatgagctgaatttgggcgagcagagtttcgtcggtggtggcggttggaacgatctgtatcaaggattgatggccggtgaaacactgaaattggcgttaatgagaatggagcgggtttatgttgagcaaaactctcgtcgtcaggaaattaccaaaacgatctcgttgaaagcactgctcggtgaaagctggcctgcggagctgaataagctaaaacaaaaaacgccaattaactttaatctggaagaacagatttttgttgaggactatcaagagctgtatcagcgcagaattaagtcggtttcggtcagtttgccgatgttagttgggccttatgaagacgtgtgtgcgcagttgactcagacctccagtagttatagcacccgggcagacctcaagacggtagaaaatatgctgactaaaagaacgtttgccgatacgccgcacttggttcgtagtattcaacccaatcagcagatttctttatcgactggggtgaatgatagcgggctgtttatgcttaattttgatgatgagcgtttcttgccatttgaaggttctggcgttgattcaagctggcgtttgcaattcaccaatttgaaacagaatttggatagcctcaacgatgtcattctacatgtgaagtatacagccgcgattggctcatcaactttcagtcagggcgtaaggaaaatattggccaatataaacaacgatgaacatcatcatcaccaccaccaccactaa

SEQ ID NO: 28 - DNA, 285 bp, synthetic construct
  source 1..285: mol_type = other DNA
aagaaaccaattgtccatattgcatcagacattgccgtcactgcgtcttttactggctcttctcgctaaccaaaccggtaaccccgcttattaaaagcattctgtaacaaagcgggaccaaagccatgacaaaaacgcgtaacaaaagtgtctataatcacggcagaaaagtccacattgattatttgcacggcgtcacactttgctatgccatagcatttttatccataagattagcggatcctacctgacgctttttatcgcaactctctactgtttctccat

SEQ ID NO: 29 - DNA, 319 bp, synthetic construct
  source 1..319: mol_type = other DNA
aagaaaccaattgtccatattgcatcagacattgccgtcactgcgtcttttactggctcttctcgctaaccaaaccggtaaccccgcttattaaaagcattctgtaacaaagcgggaccaaagccatgacaaaaacgcgtaacaaaagtgtctataatcacggcagaaaagtccacattgattatttgcacggcgtcacactttgctatgccatagcatttttatccataagattagcggatcctacctgacgctttttatcgcaactctctactgtttctccatacccgtttttttgggctaacaggaggaattaacc

SEQ ID NO: 30 - DNA, 1224 bp, synthetic construct
  source 1..1224: mol_type = other DNA
ggttaattcctcctgttagcccaaaaaaacgggtatggagaaacagtagagagttgcgataaaaagcgtcaggtaggatccgctaatcttatggataaaaatgctatggcatagcaaagtgtgacgccgtgcaaataatcaatgtggacttttctgccgtgattatagacacttttgttacgcgtttttgtcatggctttggtcccgctttgttacagaatgcttttaataagcggggttaccggtttggttagcgagaagagccagtaaaagacgcagtgacggcaatgtctgatgcaatatggacaattggtttcttctctgaatggcgggagtatgaaaagtatggctgaagcgcaaaatgatcccctgctgccgggatactcgtttaatgcccatctggtggcgggtttaacgccgattgaggccaacggttatctcgatttttttatcgaccgaccgctgggaatgaaaggttatattctcaatctcaccattcgcggtcagggggtggtgaaaaatcagggacgagaatttgtttgccgaccgggtgatattttgctgttcccgccaggagagattcatcactacggtcgtcatccggaggctcgcgaatggtatcaccagtgggtttactttcgtccgcgcgcctactggcatgaatggcttaactggccgtcaatatttgccaatacggggttctttcgcccggatgaagcgcaccagccgcatttcagcgacctgtttgggcaaatcattaacgccgggcaaggggaagggcgctattcggagctgctggcgataaatctgcttgagcaattgttactgcggcgcatggaagcgattaacgagtcgctccatccaccgatggataatcgggtacgcgaggcttgtcagtacatcagcgatcacctggcagacagcaattttgatatcgccagcgtcgcacagcatgtttgcttgtcgccgtcgcgtctgtcacatcttttccgccagcagttagggattagcgtcttaagctggcgcgaggaccaacgtatcagccaggcgaagctgcttttgagcaccacccggatgcctatcgccaccgtcggtcgcaatgttggttttgacgatcaactctatttctcgcgggtatttaaaaaatgcaccggggccagcccgagcgagttccgtgccggttgtgaagaaaaagtgaatgatgtagccgtcaagttgtcataa

SEQ ID NO: 31 - DNA, 2680 bp, Yersinia entomophaga
  source 1..2680: mol_type = other DNA
ttaaagtgtgtcggcattatcccgaaaagtatttcgtctaaaaattttcctatatagtgaaaatataaccttgatggatctgtaaaagatagagttgtgattaatataacgaacggacatgttcttcttgttgtttactttgtaagatttccctcgcaaagattgtaattcaaaatcatcactaattagaacgactttcttttttaatcgactgaatagttgatggatgttgttattgtttatcgtcatctctctttctggccaaaccaaagtgagtaaatcatccctatctattagctgaccgtttgacgcatgattaaccagtgcgataaataataaatactctttattcgttaactctacactacctttcaggctatacacaatcttttcatctgccactacaaaatacatcataactactcctccttaaaattagaatgcccgcaatatatcgcaacaaaagtaattttgtaaggctacccttggttattgtttgttaatattgatgagcttcatatttttaccaaatataacgtaataagttgttgttgtaatgctttgctgctatttttttatatttctttagccagtgtaattagcttattatttaattaaacatagcgatattgagcttatcttattgatccttcttattcgattgaactaattgttcaataatatgaacaaatacatgtgcaaaaatagaacgcttgtcccctgtgtttacagagtttctctgtcatttcgaagattcagatattacttcattgctgcttttatcatcaggtaagtgtgggtgagtagagtgattatcttcataaatgactaaatccaatagacgcagatttatattaatcttgagcctgcgtcattctgacgttaactgcggcttagcatcaataatagagagtaatataattcttatattgctattcaagctgattataaagtatttaattttacacatataattaattaagttgcttatagatggtgaggttggtttgttgtctttatgtaattaatcacaaaaataaaattcaattactaagtatcaaaaaactataaatatcgattagattatgttcgttagctcaaatcaacgggcttgaggttacctggatgaataaaatggatgttcaatgaaaaccttcagttagacaaaataaattctttgttctttgtatttaaaacaccaacggaatccgttaatggcagcgagcaggatttatatttttgctgcttttatctgctttctcagcatccaagatctatttatcacgaatggggagggctatgaaaaattatcaggaaaaaggctggtgacggccagattaaagggacgaggccgtaatggcgaatgatcctcagtggtttaaacagtacggaaatcagaaaaacacgattgttcgctggcccgtaaggccgtgaagaacaggatggggaggggatatgacgttaaagattccgactgatacacaggcaattacctggttaattattggccttttttcagcttggggaggtgttgtgagatatctcatggatatgcaagggcacagggggagttggagttggatgggaataataagtcagatcattatttcaagcttcactggccttttggggggattactcagctttgaaaatggcagtagtcattacatgacttttgctattgcaggcttatttggcaccttggggagtacggcgttgagttacctgtggcggcgtttcttggggagtccggagaaaaatcgtgggtaactttacttttagtcaaatcagtcaacgcaatctacaaggcatacacccggatctcgttcgggtggtgtacctggcactcaaattgtccgaggtggattttcgcgttatcgaagggctgcgtgatagcgcacgtcaacggcaaatggtgcttaatggcaagagccaaacgctcaatagccggcatcttaccggtcatgcggtcgatttggcgccttggttcaacaacacgattccctggaacgattggggagcgtttgctcaggttgcagcggcgatgaaacaggcggcgaagcaactacaaattcctgtgatctggggcggtgactggacgacgcttaaggatgggccgcactttgagttgccgaggatgcagtatccatgagtctgctcagtgttttgaaacgtggtctgctacttgccacgctatttgcggttttggttggcgggctgtgggttgctcaactgaaaaagaccgcgacattactgaattctgaaaatatcagtctgacgcagcagaatcagctttatctgcaacggttgcaaggatatgaccagcagatgaaaacactggatgaggcgttaaccactaatgccataactcagcgtcaggcagaggagaaatatcatgcgatcgaacaacaaatgcggcggctgctggctaatagccgctgcgctcgggagcctgtgcctgatgctgttatccggttgcagcaacgagcacttggccaaagcctgcccggtgcagccaatagtaccgaaagcgctgctattgccccatgatcccccgttatttaacgtcacaaagtggggggactatcccggttatgtggaagaattaaatctatcgttggcgcgttgtaatgcagataaaacggcggtggcccaaataatgtctccccaaaaaggataa

SEQ ID NO: 32 - DNA, 1225 bp, Yersinia entomophaga
  source 1..1225: mol_type = other DNA
atgacgttaaagattccgactgatacacaggcaattacctggttaattattggccttttttcagcttggggaggtgttgtgagatatctcatggatatgcaagggcacagggggagttggagttggatgggaataataagtcagatcattatttcaagcttcactggccttttggggggattactcagctttgaaaatggcagtagtcattacatgacttttgctattgcaggcttatttggcaccttggggagtacggcgttgagttacctgtggcggcgtttcttggggagtccggagaaaaatcgtgggtaactttacttttagtcaaatcagtcaacgcaatctacaaggcatacacccggatctcgttcgggtggtgtacctggcactcaaattgtccgaggtggattttcgcgttatcgaagggctgcgtgatagcgcacgtcaacggcaaatggtgcttaatggcaagagccaaacgctcaatagccggcatcttaccggtcatgcggtcgatttggcgccttggttcaacaacacgattccctggaacgattggggagcgtttgctcaggttgcagcggcgatgaaacaggcggcgaagcaactacaaattcctgtgatctggggcggtgactggacgacgcttaaggatgggccgcactttgagttgccgaggatgcagtatccatgagtctgctcagtgttttgaaacgtggtctgctacttgccacgctatttgcggttttggttggcgggctgtgggttgctcaactgaaaaagaccgcgacattactgaattctgaaaatatcagtctgacgcagcagaatcagctttatctgcaacggttgcaaggatatgaccagcagatgaaaacactggatgaggcgttaaccactaatgccataactcagcgtcaggcagaggagaaatatcatgcgatcgaacaacaaatgcggcggctgctggctaatagccgctgcgctcgggagcctgtgcctgatgctgttatccggttgcagcaacgagcacttggccaaagcctgcccggtgcagccaatagtaccgaaagcgctgctattgccccatgatcccccgttatttaacgtcacaaagtggggggactatcccggttatgtggaagaattaaatctatcgttggcgcgttgtaatgcagataaaacggcggtggcccaaataatgtctccccaaaaaggataa
